(19) United States
(12) Patent Application Publication
(10) Pub. No.: US 2022/0170033 A1
(43) Pub. Date: Jun. 2, 2022

(54) PLANT EXPLANT TRANSFORMATION

(71) Applicants: PIONEER HI-BRED INTERNATIONAL, INC., JOHNSTON, IA (US); CORTEVA AGRISCIENCE LLC, INDIANAPOLIS, IN (US)

(72) Inventors: MAREN L ARLING, DES MOINES, IA (US); SHUJUN CHANG, JOHNSTON, IA (US); WILLIAM JAMES GORDON-KAMM, URBANDALE, IA (US); NATHALIE SANYOUR-DOYEL, POLK CITY, IA (US); NAGESH SARDESAI, JOHNSTON, IA (US)

(73) Assignees: PIONEER HI-BRED INTERNATIONAL, INC., JOHNSTON, IA (US); CORTEVA AGRISCIENCE LLC, INDIANAPOLIS, IN (US)

(21) Appl. No.: 17/442,552

(22) PCT Filed: Mar. 26, 2020
(86) PCT No.: PCT/US2020/024814

§ 371 Date: Sep. 23, 2021

Related U.S. Application Data
(60) Provisional application No. 62/824,746, filed on Mar. 27, 2019.

(51) Int. Cl. C12N 15/82; C07K 14/415; C12N 9/22

(52) U.S. Cl. CPC C12N 15/8213; C07K 14/415; C12N 2310/20; C12N 15/8241; C12N 15/8205; C12N 9/22

(57) ABSTRACT

Methods for transforming dicot vegetative plant organs and their composite tissues are provided.

### CROSS-REFERENCE TO RELATED APPLICATIONS

[0001] This application claims the benefit of PCT Application Serial Number PCT/US2020/024814, filed Mar. 26, 2020, which claims the benefit of U.S. Provisional Application No. 62/824,746, filed Mar. 27, 2019, all of which are hereby incorporated herein by reference in their entireties.

### FIELD OF THE DISCLOSURE

[0002] The present disclosure relates to the field of plant molecular biology, more particularly to vegetative plant organs and their composite tissues transformation in dicot plants.

### REFERENCE TO SEQUENCE LISTING SUBMITTED ELECTRONICALLY

[0003] The official copy of the sequence listing is submitted electronically via EFS-Web as an ASCII formatted sequence listing with a file named 8045-US-PCT Seq TXT created on Jul. 14, 2021, and having a size of 1,151,693 bytes and is filed concurrently with the specification. The sequence listing contained in this ASCII formatted document is part of the specification and is herein incorporated by reference in its entirety.

### BACKGROUND OF THE DISCLOSURE

[0004] In recent years, there has been a tremendous expansion of the capabilities for the genetic engineering of plants. Current transformation technology provides an opportunity to produce commercially viable transgenic plants, enabling the creation of new plant varieties containing desirable traits. One limitation of the genetic engineering of plants is the availability of plant tissue explants that are amenable to transformation since many plant tissue explants are recalcitrant to transformation and regeneration. Thus, there is a need for plant transformation methods permitting a broader range of transformable and regenerable plant explant tissues.

### SUMMARY OF THE DISCLOSURE

[0005] The present disclosure comprises methods and compositions for producing transgenic plants that contain a heterologous polynucleotide and methods and compositions for producing gene edited plants. In a further aspect, the present disclosure provides a seed from the plant produced by the methods disclosed herein.

[0006] The present disclosure provides a method of producing a transgenic dicot plant that contains a heterologous polynucleotide comprising contacting a dicot vegetative plant organ or its composite tissue with a T-DNA containing the heterologous polynucleotide and a morphogenic gene expression cassette; selecting a plant cell containing the heterologous polynucleotide and no morphogenic gene expression cassette, wherein the plant cell forms a regenerable plant structure containing the heterologous polynucleotide and no morphogenic gene expression cassette; and regenerating a transgenic plant from the regenerable plant structure containing the heterologous polynucleotide and no morphogenic gene expression cassette. In a further aspect, the morphogenic gene expression cassette comprises (i) a nucleotide sequence encoding a functional WUS/WOX polypeptide; or (ii) a nucleotide sequence encoding a Babyboom (BBM) polypeptide or an Ovule Development Protein 2 (ODP2) polypeptide; or (iii) a combination of (i) and (ii). In a further aspect, the nucleotide sequence encodes the functional WUS/WOX polypeptide. In a further aspect, the nucleotide sequence encoding the functional WUS/WOX polypeptide is selected from WUS, WUS1, WUS2, WUS3, WOX2 A, WOX4, WOX5, and WOX9. In a further aspect, the nucleotide sequence encodes the Babyboom (BBM) polypeptide or the Ovule Development Protein 2 (ODP2) polypeptide. In a further aspect, the nucleotide sequence encoding the Babyboom (BBM) polypeptide is selected from BBM2, BMN2, and BMN3 or the Ovule Development Protein 2 (ODP2) polypeptide is ODP2. In a further aspect, the nucleotide sequence encodes the functional WUS/WOX polypeptide and the Babyboom (BBM) polypeptide or the Ovule Development Protein 2 (ODP2) polypeptide. In a further aspect, the nucleotide sequence encoding the functional WUS/WOX polypeptide is selected from WUS, WUS1, WUS2, WUS3, WOX2 A, WOX4, WOX5, and WOX9 and the Babyboom (BBM) polypeptide is selected from BBM2, BMN2, and BMN3 or the Ovule Development Protein 2 (ODP2) polypeptide is ODP2. In a further aspect, the heterologous polynucleotide is selected from the group consisting of a heterologous polynucleotide conferring a nutritional enhancement, a heterologous polynucleotide conferring a modified oil content, a heterologous polynucleotide conferring a modified protein content, a heterologous polynucleotide conferring a modified metabolite content, a heterologous polynucleotide conferring increased yield, a heterologous polynucleotide conferring abiotic stress tolerance, a heterologous polynucleotide conferring drought tolerance, a heterologous polynucleotide conferring cold tolerance, a heterologous polynucleotide conferring herbicide tolerance, a heterologous polynucleotide conferring pest resistance, a heterologous polynucleotide conferring pathogen resistance, a heterologous polynucleotide conferring insect resistance, a heterologous polynucleotide conferring nitrogen use efficiency (NUE), a heterologous polynucleotide conferring disease resistance, a heterologous polynucleotide conferring increased biomass, a heterologous polynucleotide conferring an ability to alter a metabolic pathway, and a combination of the foregoing. In a further aspect, the dicot vegetative plant organ or its composite tissue is selected from the group consisting of a leaf explant, a leaf primordia, a stipule, a cotyledon, a cotyledonary node, a mesocotyl, a stem explant, a primary root, a lateral secondary root, a root segment, a bud, and a meristem, including but not limited to an apical meristem, a root meristem, a secondary meristem, an axillary meristem, a floral meristem, and a combination of the foregoing. In a further aspect, the leaf explant is selected from the group consisting of a leaf, a radical leaf, a cauline leaf, an alternate leaf, and opposite leaf, a decussate leaf, an opposite superposed leaf, a whorled leaf, a petiolate leaf, a sessile leaf, a subsessile leaf, a stipulate leaf, an exstipulate leaf, a simple leaf, a compound leaf, and a combination of the foregoing. In a further aspect, the stem explant is selected from the group consisting of a stem nodal region, a stem internodal region, a petiole, a hypocotyl, an epicotyl, a stolon, a rhizome, a tuber, a corm, and a combination of the foregoing. In a further aspect, the dicot is selected from the group consisting of soybean, cotton, sunflower, cassava, common bean, cowpea, tomato, potato, beet, grape, Eucalyptus, citrus, papaya, cacao, cucumber, apple, Capsicum, melon, and Brassica. In a further aspect, the morphogenic gene expression cassette comprises a polynucleotide encoding a functional WUS/WOX polypeptide, wherein the functional WUS/WOX polypeptide comprises an amino acid sequence of any of SEQ ID NOS: 61, 63, 65, 67, 69, 71, 73, 75, 77, 79, 81, 83, 85, 87, 89, 91, 93, 95, 97, 99, 101, 103, 105, 107, 128, 130, 132, 134, 136, 138, 140, 142, 144, 146, or 148; or wherein the functional WUS/WOX polypeptide is encoded by a nucleotide sequence of any of SEQ ID NOS: 60, 62, 64, 66, 68, 70, 72, 74, 76, 78, 80, 82, 84, 86, 88, 90, 92, 94, 96, 98, 100, 102, 104, 106, 127, 129, 131, 133, 135, 137, 139, 141, 143, 145, or 147. In a further aspect, the morphogenic gene expression cassette further comprises a polynucleotide sequence encoding a site-specific recombinase selected from the group consisting of FLP, FLPe, KD, Cre, SSV1, lambda Int, phi C31 Int, HK022, R, B2, B3, Gin, Tn1721, CinH, ParA, Tn5053, Bxb1, TP907-1, or U153, wherein the site-specific recombinase is operably linked to a constitutive promoter, an inducible promoter, a tissue-specific promoter, or a developmentally regulated promoter. In a further aspect, the method further comprising excising the morphogenic gene expression cassette. In a further aspect, a transgenic plant produced by the method is provided. In a further aspect, a seed of the transgenic plant produced by the method is provided, wherein the seed comprises the heterologous polynucleotide. In a further aspect, the regenerable plant structure is formed at an increased frequency of from about 0.1% to about 1.0%, from about 1.1% to about 10%, from about 10.1% to about 20%, from about 20.1% to about 30%, from about 30.1% to about 40%, from about 40.1% to about 50%, from about 50.1% to about 60%, from about 60.1% to about 70%, from about 70.1% to about 80%, from about 80.1% to about 90%, and from about 90.1% to about 100%, compared to the frequency of regenerable plant structures formed when the dicot vegetative plant organ or its composite tissue is not contacted with the morphogenic gene expression cassette.

[0007] The present disclosure provides a method of producing a genome-edited dicot plant comprising contacting a dicot vegetative plant organ or its composite tissue with a T-DNA containing a morphogenic gene expression cassette and providing a polynucleotide encoding a site-specific polypeptide or a site-specific polypeptide; selecting a plant cell containing a genome edit and no morphogenic gene expression cassette, wherein the plant cell forms a regenerable plant structure containing the genome edit and no morphogenic gene expression cassette; and regenerating a genome-edited plant from the regenerable plant structure containing the genome edit and no morphogenic gene expression cassette. In a further aspect, the morphogenic gene expression cassette comprises (i) a nucleotide sequence encoding a functional WUS/WOX polypeptide; or (ii) a nucleotide sequence encoding a Babyboom (BBM) polypeptide or an Ovule Development Protein 2 (ODP2) polypeptide; or (iii) a combination of (i) and (ii). In a further aspect, the nucleotide sequence encodes the functional WUS/WOX polypeptide. In a further aspect, the nucleotide sequence encoding the functional WUS/WOX polypeptide is selected from WUS, WUS1, WUS2, WUS3, WOX2 A, WOX4, WOX5, and WOX9. In a further aspect, the nucleotide sequence encodes the Babyboom (BBM) polypeptide or the Ovule Development Protein 2 (ODP2) polypeptide. In a further aspect, the nucleotide sequence encoding the Babyboom (BBM) polypeptide is selected from BBM2, BMN2, and BMN3 or the Ovule Development Protein 2 (ODP2) polypeptide is ODP2. In a further aspect, the nucleotide sequence encodes the functional WUS/WOX polypeptide and the Babyboom (BBM) polypeptide or the Ovule Development Protein 2 (ODP2) polypeptide. In a further aspect, the nucleotide sequence encoding the functional WUS/WOX polypeptide is selected from WUS, WUS1, WUS2, WUS3, WOX2 A, WOX4, WOX5, and WOX9 and the Babyboom (BBM) polypeptide is selected from BBM2, BMN2, and BMN3 or the Ovule Development Protein 2 (ODP2) polypeptide is ODP2. In a further aspect, the site-specific polypeptide is selected from the group consisting of a zinc finger nuclease, a meganuclease, TALEN, and a CRISPR-Cas nuclease. In a further aspect, wherein the CRISPR-Cas nuclease is Cas9 or Cpfl nuclease and further comprising providing a guide RNA. In a further aspect, the site-specific nuclease effects an insertion, a deletion, or a substitution mutation. In a further aspect, the guide RNA and CRISPR-Cas nuclease is a ribonucleoprotein complex. In a further aspect, the dicot vegetative plant organ or its composite tissue is selected from the group consisting of a leaf explant, a leaf primordia, a stipule, a cotyledon, a cotyledonary node, a mesocotyl, a stem explant, a primary root, a lateral secondary root, a root segment, a bud, and a meristem, including but not limited to an apical meristem, a root meristem, a secondary meristem, an axillary meristem, a floral meristem, and a combination of the foregoing. In a further aspect, the leaf explant is selected from the group consisting of a leaf, a radical leaf, a cauline leaf, an alternate leaf, and opposite leaf, a decussate leaf, an opposite superposed leaf, a whorled leaf, a petiolate leaf, a sessile leaf, a subsessile leaf, a stipulate leaf, an exstipulate leaf, a simple leaf, a compound leaf, and a combination of the foregoing. In a further aspect, the stem explant is selected from the group consisting of a stem nodal region, a stem internodal region, a petiole, a hypocotyl, an epicotyl, a stolon, a rhizome, a tuber, a corm, and a combination of the foregoing. In a further aspect, the dicot, is selected from the group consisting of soybean, cotton, sunflower, cassava, common bean, cowpea, tomato, potato, beet, grape, Eucalyptus, citrus, papaya, cacao, cucumber, apple, Capsicum, melon, and Brassica. In a further aspect, the morphogenic gene expression cassette comprises a polynucleotide encoding a functional WUS/WOX polypeptide, wherein the functional WUS/WOX polypeptide comprises an amino acid sequence of any of SEQ ID NOS: 61, 63, 65, 67, 69, 71, 73, 75, 77, 79, 81, 83, 85, 87, 89, 91, 93, 95, 97, 99, 101, 103, 105, 107, 128, 130, 132, 134, 136, 138, 140, 142, 144, 146, or 148; or wherein the functional WUS/WOX polypeptide is encoded by a nucleotide sequence of any of SEQ ID NOS: 60, 62, 64, 66, 68, 70, 72, 74, 76, 78, 80, 82, 84, 86, 88, 90, 92, 94, 96, 98, 100, 102, 104, 106, 127, 129, 131, 133, 135, 137, 139, 141, 143, 145, or 147. Ina further aspect, the morphogenic gene expression cassette further comprises a polynucleotide sequence encoding a site-specific recombinase selected from the group consisting of FLP, FLPe, KD, Cre, SSV1, lambda Int, phi C31 Int, HK022, R, B2, B3, Gin, Tn1721, CinH, ParA, Tn5053, Bxb1, TP907-1, or U153, wherein the site-specific recombinase is operably linked to a constitutive promoter, an inducible promoter, a tissue-specific promoter, or a developmentally regulated promoter. In a further aspect, further comprising excising the morphogenic gene expression cassette. In a further aspect, the genome-edited plant produced by the method is provided. In a further aspect, a seed of the genome-edited plant produced by the method is provided, wherein the seed comprises the genome edit. In a further aspect, the regenerable plant structure is formed at an increased frequency of from about 0.1% to about 1.0%, from about 1.1% to about 10%, from about 10.1% to about 20%, from about 20.1% to about 30%, from about 30.1% to about 40%, from about 40.1% to about 50%, from about 50.1% to about 60%, from about 60.1% to about 70%, from about 70.1% to about 80%, from about 80.1% to about 90%, and from about 90.1% to about 100%, compared to the frequency of genome-edited regenerable plant structures formed when the dicot vegetative plant organ or its composite tissue is not contacted with the morphogenic gene expression cassette.

### BRIEF DESCRIPTION OF THE FIGURES

[0008] FIG. 1 shows a graphical representation of the percent (%) of tobacco leaf segments with de novo shoots after Agrobacterium infection with the different WUS genes as described in Example 14.

### DETAILED DESCRIPTION

[0009] The disclosures herein will be described more fully hereinafter with reference to the accompanying FIGURE, in which some, but not all possible aspects are shown. Indeed, disclosures may be embodied in many different forms and should not be construed as limited to the aspects set forth herein; rather, these aspects are provided so that this disclosure will satisfy applicable legal requirements.

[0010] Many modifications and other aspects disclosed herein will come to mind to one skilled in the art to which the disclosed methods pertain having the benefit of the teachings presented in the following descriptions and the associated FIGURE. Therefore, it is to be understood that the disclosures are not to be limited to the specific aspects disclosed and that modifications and other aspects are intended to be included within the scope of the appended claims. Although specific terms are employed herein, they are used in a generic and descriptive sense only and not for purposes of limitation.

[0011] It is also to be understood that the terminology used herein is for the purpose of describing particular aspects only and is not intended to be limiting. As used in the specification and in the claims, the term “comprising” can include the aspect of “consisting of” Unless defined otherwise, all technical and scientific terms used herein have the same meaning as commonly understood by one of ordinary skill in the art to which the disclosed compositions and methods belong. In this specification and in the claims which follow, reference will be made to a number of terms which shall be defined herein.

[0012] As used herein, a “regenerable plant structure” is a multicellular structure capable of forming a fully functional fertile plant. Regenerable plant structures capable of forming a fully functional fertile plant include but are not limited to, shoot meristem, shoots, somatic embryos, embryogenic callus, somatic meristems, and/or organogenic callus.

[0013] As used herein, a “somatic embryo” is a multicellular structure that progresses through developmental stages that are similar to the development of a zygotic embryo, including formation of globular and transition-stage embryos, formation of an embryo axis and a scutellum, and accumulation of lipids and starch. Single somatic embryos derived from a zygotic embryo germinate to produce single non-chimeric plants, which may originally derive from a single-cell.

[0014] As used herein, an “embryogenic callus” is a friable or non-friable mixture of undifferentiated or partially undifferentiated cells which subtend proliferating primary and secondary somatic embryos capable of regenerating into mature fertile plants.

[0015] As used herein, a “somatic meristem” is a multicellular structure that is similar to the apical meristem which is part of a seed-derived embryo, characterized as having an undifferentiated apical dome flanked by leaf primordia and subtended by vascular initials, the apical dome giving rise to an above-ground vegetative plant. Such somatic meristems can form single or fused clusters of meristems.

[0016] As used herein, an “organogenic callus” is a compact mixture of differentiated growing plant structures, including, but not limited to, apical meristems, root meristems, leaves and roots.

[0017] As used herein, “germination” is the growth of a regenerable structure to form a plantlet which continues growing to produce a plant.

[0018] As used herein, a “transgenic plant” is a mature, fertile plant that contains a transgene.

[0019] The methods of the disclosure can be used to transform vegetative plant organs and their composite tissues. As used herein, “vegetative plant organs and their composite tissues” include but are not limited to leaf explants, leaf primordia, stipule, cotyledons, cotyledonary nodes, mesocotyl, stem explants, primary roots, lateral secondary roots, root segments, buds, and meristems, including but not limited to apical meristems, root meristems, secondary meristems, axillary meristems, and floral meristems. As used herein, “stem explants” include but are not limited to the nodal and internodal regions of the stem, the petiole, hypocotyl, epicotyl, stolon, rhizome, tuber, and corm. As used herein, “leaf explants” include but are not limited to radical leaves, cauline leaves, alternate leaves, opposite leaves, decussate leaves, opposite superposed leaves, whorled leaves, petiolate leaves, sessile leaves, subsessile leaves, stipulate leaves, exstipulate leaves, simple leaves, or compound leaves. Leaf explants include the leaf base or the portion of the leaf immediately proximal to its attachment point to the petiole or stem. Such vegetative organs and their composite tissues can be used for transformation with nucleotide sequences encoding agronomically important traits.

[0020] As used herein, a “leaf” is a flat lateral structure that protrudes from a plant's stem, including the supporting stalk between the flattened leaf and the plant stem, but not including the axillary meristem located at the junction of the petiole and stem, including but not limited to a radical leaf, a cauline leaf, an alternate leaf, and opposite leaf, a decussate leaf, an opposite superposed leaf, a whorled leaf, a petiolate leaf, a sessile leaf, a subsessile leaf, a stipulate leaf, an exstipulate leaf, a simple leaf, or a compound leaf.

[0021] As used herein, a “stem internode” is the tissue located in the intervals between stem nodes of the plant, with the “stem node” being the region of the stem from which branches, petioles, leaves, or aerial roots grow out of the stem.

[0022] As used herein, the term “morphogenic gene” means a gene that when ectopically expressed stimulates formation of a somatically-derived structure that can produce a plant. More precisely, ectopic expression of the morphogenic gene stimulates the de novo formation of a somatic embryo or an organogenic structure, such as a shoot meristem, that can produce a plant. This stimulated de novo formation occurs either in the cell in which the morphogenic gene is expressed, or in a neighboring cell. A morphogenic gene can be a transcription factor that regulates expression of other genes, or a gene that influences hormone levels in a plant tissue, both of which can stimulate morphogenic changes. A morphogenic gene may be stably incorporated into the genome of a plant or it may be transiently expressed. In an aspect, expression of the morphogenic gene is controlled. The controlled expression may be a pulsed expression of the morphogenic gene for a particular period of time. Alternatively, the morphogenic gene may be expressed in only some transformed cells and not expressed in others. The control of expression of the morphogenic gene can be achieved by a variety of methods as disclosed herein below. The morphogenic genes useful in the methods of the present disclosure may be obtained from or derived from any plant species described herein.

[0023] As used herein, the term “morphogenic factor” means a morphogenic gene and/or the protein expressed by a morphogenic gene.

[0024] A morphogenic gene is involved in plant metabolism, organ development, stem cell development, cell growth stimulation, organogenesis, regeneration, somatic embryogenesis initiation, accelerated somatic embryo maturation, initiation and/or development of the apical meri stem, initiation and/or development of shoot meristem, initiation and/or development of shoots, or a combination thereof, such as WUS/WOX genes (WUS, WUS1, WUS2, WUS3, WOX2 A, WOX4, WOX5, or WOX9) see U.S. Pat. Nos. 7,348,468 and 7,256,322 and United States Patent Application publications 20170121722 and 20070271628; Laux et al. (1996) Development 122:87-96; and Mayer et al. (1998) Cell 95:805-815; van der Graaff et al., 2009, Genome Biology 10:248; Dolzblasz et al., 2016, Mol. Plant 19:1028-39 are useful in the methods of the disclosure. Modulation of WUS/WOX is expected to modulate plant and/or plant tissue phenotype including plant metabolism, organ development, stem cell development, cell growth stimulation, organogenesis, regeneration, somatic embryogenesis initiation, accelerated somatic embryo maturation, initiation and/or development of the apical meristem, initiation and/or development of shoot meristem, initiation and/or development of shoots, or a combination thereof. Expression of Arabidopsis WUS can induce stem cells in vegetative tissues, which can differentiate into somatic embryos (Zuo, et al. (2002) Plant J 30:349-359). Also of interest in this regard would be a MYB118 gene (see U.S. Pat. No. 7,148,402), MYB115 gene (see Wang et al. (2008) Cell Research 224-235), a BABYBOOM gene (BBM; see Boutilier et al. (2002) Plant Cell 14:1737-1749), or a CLAVATA gene (see, for example, U.S. Pat. No. 7,179,963).

[0025] Morphogenic polynucleotide sequences and amino acid sequences of functional WUS/WOX polypeptides are useful in the disclosed methods. As defined herein, a “functional WUS/WOX nucleotide” is any polynucleotide encoding a protein that contains a homeobox DNA binding domain, a WUS box, and an EAR repressor domain (Ikeda et al., 2009 Plant Cell 21:3493-3505). As demonstrated by Rodriguez et al., 2016 PNAS www.pnas.org/cgi/doi/10.1073/pnas.1607673113 removal of the dimerization sequence which leaves behind the homeobox DNA binding domain, a WUS box, and an EAR repressor domain results in a functional WUS/WOX polypeptide. The Wuschel protein, designated hereafter as WUS, plays a key role in the initiation and maintenance of the apical meristem, which contains a pool of pluripotent stem cells (Endrizzi, et al., (1996) Plant Journal 10:967-979; Laux, et al., (1996) Development 122:87-96; and Mayer, et al., (1998) Cell 95:805-815). Arabidopsis plants mutant for the WUS gene contain stem cells that are misspecified and that appear to undergo differentiation. WUS encodes a novel homeodomain protein which presumably functions as a transcriptional regulator (Mayer, et al., (1998) Cell 95:805-815). The stem cell population of Arabidopsis shoot meristems is believed to be maintained by a regulatory loop between the CLAVATA (CLV) genes which promote organ initiation and the WUS gene which is required for stem cell identity, with the CLV genes repressing WUS at the transcript level, and WUS expression being sufficient to induce meristem cell identity and the expression of the stem cell marker CLV3 (Brand, et al., (2000) Science 289:617-619; Schoof, et al., (2000) Cell 100:635-644). Constitutive expression of WUS in Arabidopsis has been shown to lead to adventitious shoot proliferation from leaves (in planta) (Laux, T., Talk Presented at the XVI International Botanical Congress Meeting, Aug. 1-7, 1999, St. Louis, Mo.).

[0026] In an aspect, the functional WUS/WOX polypeptides useful in the methods of the present disclosure is a WUS, WUS1, WUS2, WUS3, WOX2 A, WOX4, WOX5, WOX5 A, or WOX9 polypeptide (see, U.S. Pat. Nos. 7,348,468 and 7,256,322 and US Patent Application Publication Numbers 2017/0121722 and 2007/0271628, herein incorporated by reference in their entirety and van der Graaff et al., 2009, Genome Biology 10:248). The functional WUS/WOX polypeptides useful in the methods of the present disclosure can be obtained from or derived from any plant including but not limited to monocots, dicots, Angiospermae, and Gymnospermae. Additional WUS/WOX genes useful in the methods of the present disclosure are listed in Table 3.

[0027] Other morphogenic genes useful in the present disclosure include, but are not limited to, LEC1 (U.S. Pat. No. 6,825,397 incorporated herein by reference in its entirety, Lotan et al., 1998, Cell 93:1195-1205), LEC2 (Stone et al., 2008, PNAS 105:3151-3156; Belide et al., 2013, Plant Cell Tiss. Organ Cult 113:543-553), KN1/STM (Sinha et al., 1993. Genes Dev 7:787-795), the IPT gene from Agrobacterium (Ebinuma and Komamine, 2001, In vitro Cell. Dev Biol-Plant 37:103-113), MONOPTEROS-DELTA (Ckurshumova et al., 2014, New Phytol. 204:556-566), the Agrobacterium AV-6b gene (Wabiko and Minemura 1996, Plant Physiol. 112:939-951), the combination of the Agrobacterium IAA-h and IAA-m genes (Endo et al., 2002, Plant Cell Rep., 20:923-928), the Arabidopsis SERK gene (Hecht et al., 2001, Plant Physiol. 127:803-816), the Arabidopsis AGL15 gene (Harding et al., 2003, Plant Physiol. 133:653-663), the FUSCA gene (Castle and Meinke, Plant Cell 6:25-41), and the PICKLE gene (Ogas et al., 1999, PNAS 96:13839-13844).

[0028] As used herein, the term “transcription factor” means a protein that controls the rate of transcription of specific genes by binding to the DNA sequence of the promoter and either up-regulating or down-regulating expression. Examples of transcription factors that are also morphogenic genes, include members of the AP2/EREBP family (including BBM (ODP2)), plethora and aintegumenta sub-families, CAAT-box binding proteins such as LEC1 and HAP3, and members of the MYB, bHLH, NAC, MADS, bZIP and WRKY families.

[0029] Morphogenic polynucleotide sequences and amino acid sequences of Ovule Development Protein 2 (ODP2) polypeptides, and related polypeptides, e.g., Babyboom (BBM) protein family proteins are useful in the methods of the disclosure. In an aspect, a polypeptide comprising two AP2-DNA binding domains is an ODP2, BBM2, BMN2, or BMN3 polypeptide see, US Patent Application Publication Number 2017/0121722, herein incorporated by reference in its entirety. ODP2 polypeptides useful in the methods of the disclosure contain two predicted APETALA2 (AP2) domains and are members of the AP2 protein family (PFAM Accession PF00847). The AP2 family of putative transcription factors has been shown to regulate a wide range of developmental processes, and the family members are characterized by the presence of an AP2 DNA binding domain. This conserved core is predicted to form an amphipathic alpha helix that binds DNA. The AP2 domain was first identified in APETALA2, an Arabidopsis protein that regulates meristem identity, floral organ specification, seed coat development, and floral homeotic gene expression. The AP2 domain has now been found in a variety of proteins.

[0030] ODP2 polypeptides useful in the methods of the disclosure share homology with several polypeptides within the AP2 family, e.g., see FIG. 1 of U.S. Pat. No. 8,420,893, which is incorporated herein by reference in its entirety, and provides an alignment of the maize and rice ODP2 polypeptides with eight other proteins having two AP2 domains. A consensus sequence of all proteins appearing in the alignment of U.S. Pat. No. 8,420,893 is also provided in FIG. 1 therein. The polypeptide comprising the two AP2-DNA binding domains useful in the methods of the disclosure can be obtained from or derived from any of the plants described herein. In an aspect, the polypeptide comprising the two AP2-DNA binding domains useful in the methods of the disclosure is an ODP2 polypeptide. In an aspect, the polypeptide comprising the two AP2-DNA binding domains useful in the methods of the disclosure is a BBM2 polypeptide. The ODP2 polypeptide and the BBM2 polypeptide useful in the methods of the disclosure can be obtained from or derived from any plant including but not limited to monocots, dicots, Angiospermae, and Gymnospermae.

[0031] As used herein, the term “expression cassette” means a distinct component of vector DNA consisting of coding and non-coding sequences including 5′ and 3′ regulatory sequences that control expression in a transformed/transfected cell.

[0032] As used herein, the term “coding sequence” means the portion of DNA sequence bounded by a start and a stop codon that encodes the amino acids of a protein.

[0033] As used herein, the term “non-coding sequence” means the portions of a DNA sequence that are transcribed to produce a messenger RNA, but that do not encode the amino acids of a protein, such as 5′ untranslated regions, introns and 3′ untranslated regions. Non-coding sequence can also refer to RNA molecules such as micro-RNAs, interfering RNA or RNA hairpins, that when expressed can down-regulate expression of an endogenous gene or another transgene.

[0034] As used herein, the term “regulatory sequence” means a segment of a nucleic acid molecule which is capable of increasing or decreasing the expression of a gene. Regulatory sequences include promoters, terminators, enhancer elements, silencing elements, 5′ UTR and 3′ UTR (untranslated regions).

[0035] As used herein, the term “transfer cassette” means a T-DNA comprising an expression cassette or expression cassettes flanked by the right border and the left border.

[0036] As used herein, T-DNA means a portion of a Ti plasmid that is inserted into the genome of a host plant cell.

[0037] As used herein, the term “selectable marker” means a transgene that when expressed in a transformed/transfected cell confers resistance to selective agents such as antibiotics, herbicides and other compounds toxic to an untransformed/untransfected cell.

[0038] As used herein, the term “EAR” means an Ethylene-responsive element binding factor-associated Amphiphilic Repression motif” having general consensus sequences that act as transcriptional repression signals within transcription factors. Addition of an EAR-type repressor element to a DNA-binding protein such as a transcription factor, dCAS9, or LEXA (as examples) confers transcriptional repression function to the fusion protein (Kagale, S., and Rozwadowski, K. 2010. Plant Signaling and Behavior 5:691-694).

[0039] In an aspect, the transformation methods of the disclosure use the recombinant expression cassette or construct comprising a nucleotide sequence encoding a functional WUS/WOX polypeptide, or a nucleotide sequence encoding a Babyboom (BBM) polypeptide or an Ovule Development Protein 2 (ODP2) polypeptide, or a combination of a nucleotide sequence encoding a functional WUS/WOX polypeptide and a nucleotide sequence encoding a Babyboom (BBM) polypeptide or an Ovule Development Protein 2 (ODP2) polypeptide. In an aspect, the nucleotide sequence encoding the functional WUS/WOX polypeptide, or the nucleotide sequence encoding a Babyboom (BBM) polypeptide or an Ovule Development Protein 2 (ODP2) polypeptide, or the combination of a nucleotide sequence encoding a functional WUS/WOX polypeptide and a nucleotide sequence encoding a Babyboom (BBM) polypeptide or an Ovule Development Protein 2 (ODP2) polypeptide can be targeted for excision by a site-specific recombinase. Thus, the expression of the nucleotide sequence encoding the functional WUS/WOX polypeptide, or the nucleotide sequence encoding a Babyboom (BBM) polypeptide or an Ovule Development Protein 2 (ODP2) polypeptide, or the combination of a nucleotide sequence encoding a functional WUS/WOX polypeptide and a nucleotide sequence encoding a Babyboom (BBM) polypeptide or an Ovule Development Protein 2 (ODP2) polypeptide can be controlled by excision at a desired time post-transformation. It is understood that when a site-specific recombinase is used to control the expression of the nucleotide sequence encoding the functional WUS/WOX polypeptide, or the nucleotide sequence encoding a Babyboom (BBM) polypeptide or an Ovule Development Protein 2 (ODP2) polypeptide, or the combination of a nucleotide sequence encoding a functional WUS/WOX polypeptide and a nucleotide sequence encoding a Babyboom (BBM) polypeptide or an Ovule Development Protein 2 (ODP2) polypeptide, the expression construct comprises appropriate site-specific excision sites flanking the polynucleotide sequences to be excised, e.g., Cre lox sites if Cre recombinase is utilized. It is not necessary that the site-specific recombinase be co-located on the expression construct comprising the nucleotide sequence encoding the functional WUS/WOX polypeptide, or the nucleotide sequence encoding a Babyboom (BBM) polypeptide or an Ovule Development Protein 2 (ODP2) polypeptide, or the combination of a nucleotide sequence encoding a functional WUS/WOX polypeptide and a nucleotide sequence encoding a Babyboom (BBM) polypeptide or an Ovule Development Protein 2 (ODP2) polypeptide. However, in an aspect, the morphogenic gene expression cassette further comprises a nucleotide sequence encoding a site-specific recombinase.

[0040] The site-specific recombinase used to control expression of the nucleotide sequence encoding the functional WUS/WOX polypeptide, or the nucleotide sequence encoding a Babyboom (BBM) polypeptide or an Ovule Development Protein 2 (ODP2) polypeptide, or the combination of a nucleotide sequence encoding a functional WUS/WOX polypeptide and a nucleotide sequence encoding a Babyboom (BBM) polypeptide or an Ovule Development Protein 2 (ODP2) polypeptide can be chosen from a variety of suitable site-specific recombinases. For examples, in various aspects, the site-specific recombinase is FLP, FLPe, KD, Cre, SSV1, lambda Int, phi C31 Int, HK022, R, B2 (Nern et al., (2011) PNAS Vol. 108, No. 34 pp 14198-14203), B3 (Nern et al., (2011) PNAS Vol. 108, No. 34 pp 14198-14203), Gin, Tn1721, CinH, ParA, Tn5053, Bxb1, TP907-1, or U153. The site-specific recombinase can be a destabilized fusion polypeptide. The destabilized fusion polypeptide can be TETR(G17 A)˜CRE or ESR(G17 A)˜CRE.

[0041] In an aspect, the nucleotide sequence encoding a site-specific recombinase is operably linked to a constitutive promoter, an inducible promoter, a tissue-specific promoter, or a developmentally-regulated promoter. Suitable constitutive promoters, inducible promoters, tissue-specific promoters, and developmentally-regulated promoters include UBI, LLDAV, EVCV, DMMV, BSV(AY) PRO, CYMV PRO FL, UBIZM PRO, SI-UB3 PRO, SB-UBI PRO (ALT1), USB1ZM PRO, ZM-GOS2 PRO, ZM-H1B PRO (1.2 KB), IN2-2, NOS, the −135 version of 35S, ZM-ADF PRO (ALT2), AXIG1, DRS, XVE, GLB1, OLE, LTP2 (Kalla et al., 1994. Plant J. 6:849-860 and U.S. Pat. No. 5,525,716 incorporated herein by reference in its entirety), HSP17.7, HSP26, HSP18 A, AT-HSP811, AT-HSP811L, GM-HSP173B, promoters activated by tetracycline, ethametsulfuron or chlorsulfuron, PLTP, PLTP1, PLTP2, PLTP3, SDR, LGL, LEA-14 A, or LEA-D34 (United States Patent Application publications 20170121722 and 20180371480 incorporated herein by reference in their entireties).

[0042] In an aspect, the chemically inducible promoter operably linked to the site-specific recombinase is XVE. The chemically-inducible promoter can be repressed by the tetracycline repressor (TETR), the ethametsulfuron repressor (ESR), or the chlorsulfuron repressor (CR), and de-repression occurs upon addition of tetracycline-related or sulfonylurea ligands. The repressor can be TETR and the tetracycline-related ligand is doxycycline or anhydrotetracycline. (Gatz, C., Frohberg, C. and Wendenburg, R. (1992) Stringent repression and homogeneous de-repression by tetracycline of a modified CaMV 35S promoter in intact transgenic tobacco plants, Plant J. 2, 397-404). Alternatively, the repressor can be ESR and the sulfonylurea ligand is ethametsulfuron, chlorsulfuron, metsulfuron-methyl, sulfometuron methyl, chlorimuron ethyl, nicosulfuron, primisulfuron, tribenuron, sulfosulfuron, trifloxysulfuron, foramsulfuron, iodosulfuron, prosulfuron, thifensulfuron, rimsulfuron, mesosulfuron, or halosulfuron (US20110287936 incorporated herein by reference in its entirety).

[0043] In an aspect, when the morphogenic gene expression cassette or construct comprises site-specific recombinase excision sites, the nucleotide sequence encoding the functional WUS/WOX polypeptide, or the nucleotide sequence encoding a Babyboom (BBM) polypeptide or an Ovule Development Protein 2 (ODP2) polypeptide, or the combination of a nucleotide sequence encoding a functional WUS/WOX polypeptide and a nucleotide sequence encoding a Babyboom (BBM) polypeptide or an Ovule Development Protein 2 (ODP2) polypeptide can be operably linked to an auxin inducible promoter, a developmentally regulated promoter, a tissue-specific promoter, or a constitutive promoter. Exemplary auxin inducible promoters, developmentally regulated promoters, tissue-specific promoters, and constitutive promoters useful in this context include UBI, LLDAV, EVCV, DMMV, BSV(AY) PRO, CYMV PRO FL, UBIZM PRO, SI-UB3 PRO, SB-UBI PRO (ALT1), USB1ZM PRO, ZM-GOS2 PRO, ZM-H1B PRO (1.2 KB), IN2-2, NOS, the −135 version of 35S, ZM-ADF PRO (ALT2), AXIG1 (U.S. Pat. No. 6,838,593 incorporated herein by reference in its entirety), DRS, XVE, GLB1, OLE, LTP2, HSP17.7, HSP26, HSP18 A, AT-HSP811 (Takahashi, T, et al., (1992) Plant Physiol. 99 (2): 383-390), AT-HSP811L (Takahashi, T, et al., (1992) Plant Physiol. 99 (2): 383-390), GM-HSP173B (Schoffl, F., et al. (1984) EMBO J. 3(11): 2491-2497), promoters activated by tetracycline, ethamethsulfuron or chlorsulfuron, PLTP, PLTP1, PLTP2, PLTP3, SDR, LGL, LEA-14 A, LEA-D34 (United States Patent Application publications 20170121722 and 20180371480 incorporated herein by reference in their entireties), and any of the promoters disclosed herein.

[0044] When using a morphogenic gene cassette and a trait gene cassette (heterologous polynucleotide) to produce transgenic plants it is desirable to have the ability to segregate the morphogenic gene locus away from the trait gene (heterologous polynucleotide) locus in co-transformed plants to provide transgenic plants containing only the trait gene (heterologous polynucleotide). This can be accomplished using an Agrobacterium tumefaciens two T-DNA binary system, with two variations on this general theme (see Miller et al., 2002). For example, in the first, a two T-DNA vector, where expression cassettes for morphogenic genes and herbicide selection (i.e. HRA) are contained within a first T-DNA and the trait gene cassette (heterologous polynucleotide) is contained within a second T-DNA, where both T-DNA's reside on a single binary vector. When a plant cell is transformed by an Agrobacterium containing the two T-DNA plasmid a high percentage of transformed cells contain both T-DNA's that have integrated into different genomic locations (for example, onto different chromosomes). In the second method, for example, two Agrobacterium strains, each containing one of the two T-DNA's (either the morphogenic gene T-DNA or the trait gene (heterologous polynucleotide) T-DNA), are mixed together in a ratio, and the mixture is used for transformation. After transformation using this mixed Agrobacterium method, it is observed at a high frequency that recovered transgenic events contain both T-DNA's, often at separate genomic locations. For both co-transformation methods, it is observed that in a large proportion of the produced transgenic events, the two T-DNA loci segregate independently and progeny T1 plants can be readily identified in which the T-DNA loci have segregated away from each other, resulting in the recovery of progeny seed that contain the trait genes (heterologous polynucleotides) with no morphogenic genes/herbicide genes. See, Miller et al. Transgenic Res 11(4):381-96.

[0045] The methods provided herein rely upon the use of bacteria-mediated and/or biolistic-mediated gene transfer to produce regenerable plant cells having an incorporated nucleotide sequence of interest. Bacterial strains useful in the methods of the disclosure include, but are not limited to, a disarmed Agrobacteria, an Ochrobactrum bacteria or a Rhizobiaceae bacteria. Disarmed Agrobacteria useful in the present methods include, but are not limited to, AGL-1, EHA105, GV3101, LBA4404, and LBA4404 THY-. Ochrobactrum bacterial strains useful in the present methods include, but are not limited to, those disclosed in U.S. Pat. Pub. No. US20180216123 incorporated herein by reference in its entirety. Rhizobiaceae bacterial strains useful in the present methods include, but are not limited to, those disclosed in U.S. Pat. No. 9,365,859 incorporated herein by reference in its entirety.

[0046] Also embodied is a plant with the described expression cassette stably incorporated into the genome of the plant, a seed of the plant, wherein the seed comprises the expression cassette. Further embodied is a plant wherein a gene or gene product of a heterologous polynucleotide or a polynucleotide of interest that confers a nutritional enhancement, increased yield, abiotic stress tolerance, drought tolerance, cold tolerance, herbicide tolerance, pest resistance, pathogen resistance, insect resistance, nitrogen use efficiency (NUE), disease resistance, or an ability to alter a metabolic pathway. A plant wherein expression of a heterologous polynucleotide or a polynucleotide of interest alters the phenotype of said plant is also embodied.

[0047] The disclosure encompasses isolated or substantially purified nucleic acid compositions. An “isolated” or “purified” nucleic acid molecule or biologically active portion thereof is substantially free of other cellular material or culture medium when produced by recombinant techniques or substantially free of chemical precursors or other chemicals when chemically synthesized. An “isolated” nucleic acid is substantially free of sequences (including protein encoding sequences) that naturally flank the nucleic acid (i.e., sequences located at the 5′ and 3′ ends of the nucleic acid) in the genomic DNA of the organism from which the nucleic acid is derived. For example, in various aspects, the isolated nucleic acid molecule can contain less than about 5 kb, 4 kb, 3 kb, 2 kb, 1 kb, 0.5 kb or 0.1 kb of nucleotide sequences that naturally flank the nucleic acid molecule in genomic DNA of the cell from which the nucleic acid is derived.

[0048] As used herein, the term “fragment” refers to a portion of the nucleic acid sequence. Fragments of sequences useful in the methods of the present disclosure retain the biological activity of the nucleic acid sequence. Alternatively, fragments of a nucleotide sequence that are useful as hybridization probes may not necessarily retain biological activity. Fragments of a nucleotide sequence disclosed herein may range from at least about 20, 25, 50, 75, 100, 125, 150, 175, 200, 225, 250, 275, 300, 325, 350, 375, 400, 425, 450, 475, 500, 525, 550, 575, 600, 625, 650, 675, 700, 725, 750, 775, 800, 825, 850, 875, 900, 925, 950, 975, 1000, 1025, 1050, 1075, 1100, 1125, 1150, 1175, 1200, 1225, 1250, 1275, 1300, 1325, 1350, 1375, 1400, 1425, 1450, 1475, 1500, 1525, 1550, 1575, 1600, 1625, 1650, 1675, 1700, 1725, 1750, 1775, 1800, 1825, 1850, 1875, or 1900 nucleotides, and up to the full length of the subject sequence. A biologically active portion of a nucleotide sequence can be prepared by isolating a portion of the sequence and assessing the activity of the portion.

[0049] Fragments and variants of nucleotide sequences and the proteins encoded thereby useful in the methods of the present disclosure are also encompassed. As used herein, the term “fragment” refers to a portion of a nucleotide sequence and hence the protein encoded thereby or a portion of an amino acid sequence. Fragments of a nucleotide sequence may encode protein fragments that retain the biological activity of the native protein. Alternatively, fragments of a nucleotide sequence useful as hybridization probes generally do not encode fragment proteins retaining biological activity. Thus, fragments of a nucleotide sequence may range from at least about 20 nucleotides, about 50 nucleotides, about 100 nucleotides, and up to the full-length nucleotide sequence encoding the proteins useful in the methods of the present disclosure.

[0050] As used herein, the term “variants” is means sequences having substantial similarity with a promoter sequence disclosed herein. A variant comprises a deletion and/or addition of one or more nucleotides at one or more internal sites within the native polynucleotide and/or a substitution of one or more nucleotides at one or more sites in the native polynucleotide. As used herein, a “native” nucleotide sequence comprises a naturally occurring nucleotide sequence. For nucleotide sequences, naturally occurring variants can be identified with the use of well-known molecular biology techniques, such as, for example, with polymerase chain reaction (PCR) and hybridization techniques as outlined herein.

[0051] Variant nucleotide sequences also include synthetically derived nucleotide sequences, such as those generated, for example, by using site-directed mutagenesis. Generally, variants of a nucleotide sequence disclosed herein will have at least 40%, 50%, 60%, 65%, 70%, 75%, 80%, 85%, 90%, 91%, 92%, 93%, 94%, to 95%, 96%, 97%, 98%, 99% or more sequence identity to that nucleotide sequence as determined by sequence alignment programs described elsewhere herein using default parameters. Biologically active variants of a nucleotide sequence disclosed herein are also encompassed. Biological activity may be measured by using techniques such as Northern blot analysis, reporter activity measurements taken from transcriptional fusions, and the like. See, for example, Sambrook, et al., (1989) Molecular Cloning: A Laboratory Manual (2d ed., Cold Spring Harbor Laboratory Press, Cold Spring Harbor, N.Y.), hereinafter “Sambrook,” herein incorporated by reference in its entirety. Alternatively, levels of a reporter gene such as green fluorescent protein (GFP) or yellow fluorescent protein (YFP) or the like produced under the control of a promoter operably linked to a nucleotide fragment or variant can be measured. See, for example, Matz et al. (1999) Nature Biotechnology 17:969-973; U.S. Pat. No. 6,072,050, herein incorporated by reference in its entirety; Nagai, et al., (2002) Nature Biotechnology 20(1):87-90. Variant nucleotide sequences also encompass sequences derived from a mutagenic and recombinogenic procedure such as DNA shuffling. With such a procedure, one or more different nucleotide sequences can be manipulated to create a new nucleotide sequence. In this manner, libraries of recombinant polynucleotides are generated from a population of related sequence polynucleotides comprising sequence regions that have substantial sequence identity and can be homologously recombined in vitro or in vivo. Strategies for such DNA shuffling are known in the art. See, for example, Stemmer, (1994) Proc. Natl. Acad. Sci. USA 91:10747-10751; Stemmer, (1994) Nature 370:389 391; Crameri, et al., (1997) Nature Biotech. 15:436-438; Moore, et al., (1997) J. Mol. Biol. 272:336-347; Zhang, et al., (1997) Proc. Natl. Acad. Sci. USA 94:4504-4509; Crameri, et al., (1998) Nature 391:288-291 and U.S. Pat. Nos. 5,605,793 and 5,837,458, herein incorporated by reference in their entirety.

[0052] Methods for mutagenesis and nucleotide sequence alterations are well known in the art. See, for example, Kunkel, (1985) Proc. Natl. Acad. Sci. USA 82:488-492; Kunkel, et al., (1987) Methods in Enzymol. 154:367-382; U.S. Pat. No. 4,873,192; Walker and Gaastra, eds. (1983) Techniques in Molecular Biology (MacMillan Publishing Company, New York) and the references cited therein, herein incorporated by reference in their entirety. Guidance as to appropriate amino acid substitutions that do not affect biological activity of the protein of interest may be found in the model of Dayhoff et al. (1978) Atlas of Protein Sequence and Structure (Natl. Biomed. Res. Found., Washington, D.C.), herein incorporated by reference. Conservative substitutions, such as exchanging one amino acid with another having similar properties, may be optimal.

[0053] The nucleotide sequences of the present disclosure can be used to isolate corresponding sequences from other organisms, particularly other plants, more particularly other monocots or dicots. In this manner, methods such as PCR, hybridization and the like can be used to identify such sequences based on their sequence homology to the sequences set forth herein. Sequences isolated based on their sequence identity to the entire sequences set forth herein or to fragments thereof are encompassed by the present disclosure.

[0054] In a PCR approach, oligonucleotide primers can be designed for use in PCR reactions to amplify corresponding DNA sequences from cDNA or genomic DNA extracted from any plant of interest. Methods for designing PCR primers and PCR cloning are generally known in the art and are disclosed in, Sambrook, supra. See also, Innis, et al., eds. (1990) PCR Protocols: A Guide to Methods and Applications (Academic Press, New York); Innis and Gelfand, eds. (1995) PCR Strategies (Academic Press, New York); and Innis and Gelfand, eds. (1999) PCR Methods Manual (Academic Press, New York), herein incorporated by reference in their entirety. Known methods of PCR include, but are not limited to, methods using paired primers, nested primers, single specific primers, degenerate primers, gene-specific primers, vector-specific primers, partially-mismatched primers and the like. In hybridization techniques, all or part of a known nucleotide sequence is used as a probe that selectively hybridizes to other corresponding nucleotide sequences present in a population of cloned genomic DNA fragments or cDNA fragments (i.e., genomic or cDNA libraries) from a chosen organism. The hybridization probes may be genomic DNA fragments, cDNA fragments, RNA fragments, or other oligonucleotides and may be labeled with a detectable group such as 32P or any other detectable marker. Thus, for example, probes for hybridization can be made by labeling synthetic oligonucleotides based on the sequences of the present disclosure. Methods for preparation of probes for hybridization and for construction of genomic libraries are generally known in the art and are disclosed in Sambrook, supra.

[0055] In general, sequences that have activity and hybridize to the sequences disclosed herein will be at least 40% to 50% homologous, about 60%, 70%, 80%, 85%, 90%, 95% to 98% homologous or more with the disclosed sequences. That is, the sequence similarity of sequences may range, sharing at least about 40% to 50%, about 60% to 70%, and about 80%, 85%, 90%, 95% to 98% sequence similarity.

[0056] Methods of alignment of sequences for comparison are well known in the art. Thus, the determination of percent sequence identity between any two sequences can be accomplished using a mathematical algorithm. Non-limiting examples of such mathematical algorithms are the algorithm of Myers and Miller, (1988) CABIOS 4:11-17; the algorithm of Smith, et al., (1981) Adv. Appl. Math. 2:482; the algorithm of Needleman and Wunsch, (1970) J. Mol. Biol. 48:443-453; the algorithm of Pearson and Lipman, (1988) Proc. Natl. Acad. Sci. 85:2444-2448; the algorithm of Karlin and Altschul, (1990) Proc. Natl. Acad. Sci. USA 872:264, modified as in Karlin and Altschul, (1993) Proc. Natl. Acad. Sci. USA 90:5873-5877, herein incorporated by reference in their entirety. Computer implementations of these mathematical algorithms are well known in the art and can be utilized for comparison of sequences to determine sequence identity.

[0057] As used herein, “sequence identity” or “identity” in the context of two nucleic acid or polypeptide sequences refers to the residues in the two sequences that are the same when aligned for maximum correspondence over a specified comparison window. When percentage of sequence identity is used in reference to proteins it is recognized that residue positions which are not identical often differ by conservative amino acid substitutions, where amino acid residues are substituted for other amino acid residues with similar chemical properties (e.g., charge or hydrophobicity) and therefore do not change the functional properties of the molecule. When sequences differ in conservative substitutions, the percent sequence identity may be adjusted upwards to correct for the conservative nature of the substitution. Sequences that differ by such conservative substitutions are said to have “sequence similarity” or “similarity”. Means for making this adjustment are well known to those of skill in the art. Typically, this involves scoring a conservative substitution as a partial rather than a full mismatch, thereby increasing the percentage sequence identity. Thus, for example, where an identical amino acid is given a score of one and a non-conservative substitution is given a score of zero, a conservative substitution is given a score between zero and one. The scoring of conservative substitutions is calculated, e.g., as implemented in the program PC/GENE (Intelligenetics, Mountain View, Calif.).

[0058] As used herein, “percentage of sequence identity” means the value determined by comparing two optimally aligned sequences over a comparison window, wherein the portion of the polynucleotide sequence in the comparison window may comprise additions or deletions (i.e., gaps) as compared to the reference sequence (which does not comprise additions or deletions) for optimal alignment of the two sequences. The percentage is calculated by determining the number of positions at which the identical nucleic acid base or amino acid residue occurs in both sequences to yield the number of matched positions, dividing the number of matched positions by the total number of positions in the window of comparison, and multiplying the result by 100 to yield the percentage of sequence identity.

[0059] The term “substantial identity” of polynucleotide sequences means that a polynucleotide comprises a sequence that has at least 70% sequence identity, optimally at least 80%, more optimally at least 90% and most optimally at least 95%, compared to a reference sequence using an alignment program using standard parameters. One of skill in the art will recognize that these values can be appropriately adjusted to determine corresponding identity of proteins encoded by two nucleotide sequences by considering codon degeneracy, amino acid similarity, reading frame positioning and the like. Substantial identity of amino acid sequences for these purposes normally means sequence identity of at least 60%, 70%, 80%, 90% and at least 95%.

[0060] Another indication that nucleotide sequences are substantially identical is if two molecules hybridize to each other under stringent conditions. Generally, stringent conditions are selected to be about 5° C. lower than the Tm for the specific sequence at a defined ionic strength and pH. However, stringent conditions encompass temperatures in the range of about 1° C. to about 20° C. lower than the Tm, depending upon the desired degree of stringency as otherwise qualified herein. Nucleic acids that do not hybridize to each other under stringent conditions are still substantially identical if the polypeptides they encode are substantially identical. This may occur, e.g., when a copy of a nucleic acid is created using the maximum codon degeneracy permitted by the genetic code. One indication that two nucleic acid sequences are substantially identical is when the polypeptide encoded by the first nucleic acid is immunologically cross reactive with the polypeptide encoded by the second nucleic acid.

[0061] The methods, sequences, and genes disclosed herein are useful for genetic engineering of plants, e.g. to produce a transformed or transgenic plant, to express a phenotype of interest. As used herein, the terms “transformed plant” and “transgenic plant” refer to a plant that comprises within its genome a heterologous polynucleotide. Generally, the heterologous polynucleotide is stably integrated within the genome of a transgenic or transformed plant such that the polynucleotide is passed on to successive generations. The heterologous polynucleotide may be integrated into the genome alone or as part of a recombinant DNA construct. It is to be understood that as used herein the term “transgenic” includes any cell, cell line, callus, tissue, plant part or plant the genotype of which has been altered by the presence of a heterologous nucleic acid including those transgenics initially so altered as well as those created by sexual crosses or asexual propagation from the initial transgenic.

[0062] A transgenic “event” is produced by transformation of plant cells with a heterologous DNA construct, including a nucleic acid expression cassette that comprises a gene of interest, the regeneration of a population of plants resulting from the insertion of the transferred gene into the genome of the plant and selection of a plant characterized by insertion into a particular genome location. An event is characterized phenotypically by the expression of the inserted gene. At the genetic level, an event is part of the genetic makeup of a plant. The term “event” also refers to progeny produced by a sexual cross between the transformant and another plant wherein the progeny include the heterologous DNA.

[0063] The term “plant” refers to whole plants, plant organs (e.g., leaves, stems, roots, etc.), plant tissues, plant cells, plant parts, seeds, propagules, embryos, and progeny of the same. Plant cells can be differentiated or undifferentiated (e.g. callus, undifferentiated callus, immature and mature embryos, immature zygotic embryo, immature cotyledon, embryonic axis, suspension culture cells, protoplasts, leaf, leaf cells, root cells, phloem cells and pollen). Plant cells include, without limitation, cells from seeds, suspension cultures, explants, immature embryos, embryos, zygotic embryos, somatic embryos, embryogenic callus, meristem, somatic meristems, meristematic regions, organogenic callus, callus tissue, protoplasts, embryos derived from mature ear-derived seed, leaves, leaf bases, leaves from mature plants, leaf tips, immature inflorescences, tassel, immature ear, silks, cotyledons, immature cotyledons, embryonic axes, cells from leaves, cells from stems, cells from roots, cells from shoots, roots, shoots, gametophytes, sporophytes, pollen, microspores, multicellular structures (MCS), regenerable plant structures (RPS), and embryo-like structures.

[0064] Plant parts include differentiated and undifferentiated tissues including, but not limited to the following: roots, stems, shoots, leaves, pollen, seeds, tumor tissue and various forms of cells and culture (e.g., single cells, protoplasts, embryos and callus tissue). The plant tissue may be in a plant or in a plant organ, tissue or cell culture.

[0065] Grain is intended to mean the mature seed produced by commercial growers for purposes other than growing or reproducing the species. Progeny, variants and mutants of the regenerated plants are also included within the scope of the disclosure, provided these progeny, variants and mutants comprise the introduced polynucleotides.

[0066] The present disclosure also includes plants obtained by any of the methods disclosed herein. The present disclosure also includes seeds from a plant obtained by any of the methods disclosed herein.

[0067] The methods of the present disclosure may be used for transformation of plant species, including, but not limited to, alfalfa, soybean, cotton, sunflower, cassava, common bean, cowpea, tomato, potato, beet, grape, Eucalyptus, poplar, pine, douglas fir, citrus, papaya, cacao, cucumber, apple, Capsicum, melon, and Brassica. In an aspect, dicot plants used in the methods of the present disclosure, include, but are not limited to, kale, cauliflower, broccoli, mustard plant, cabbage, pea, clover, alfalfa, broad bean, tomato, peanut, cassava, soybean, canola, sunflower, safflower, tobacco, Arabidopsis, or cotton.

[0068] Higher plants, e.g., classes of Angiospermae and Gymnospermae may be used the methods of the present disclosure. Plants of suitable species useful in the methods of the present disclosure may come from the families Acanthaceae, Alliaceae, Alstroemeriaceae, Amaryllidaceae, Apocynaceae, Arecaceae, Asteraceae, Berberidaceae, Bixaceae, Brassicaceae, Bromeliaceae, Cannabaceae, Caryophyllaceae, Cephalotaxaceae, Chenopodiaceae, Colchicaceae, Cucurbitaceae, Dioscoreaceae, Ephedraceae, Erythroxylaceae, Euphorbiaceae, Fabaceae, Lamiaceae, Linaceae, Lycopodiaceae, Malvaceae, Melanthiaceae, Musaceae, Myrtaceae, Nyssaceae, Papaveraceae, Pinaceae, Plantaginaceae, Rosaceae, Rubiaceae, Salicaceae, Sapindaceae, Solanaceae, Taxaceae, Theaceae, and Vitaceae. Plants from members of the genus Abelmoschus, Abies, Acer, Allium, Alstroemeria, Ananas, Andrographis, Andropogon, Artemisia, Atropa, Berberis, Beta, Bixa, Brassica, Calendula, Camellia, Camptotheca, Cannabis, Capsicum, Carthamus, Catharanthus, Cephalotaxus, Chrysanthemum, Cinchona, Citrullus, Coffea, Colchicum, Coleus, Cucumis, Cucurbita, Cynodon, Datura, Dianthus, Digitalis, Dioscorea, Elaeis, Ephedra, Erianthus, Erythroxylum, Eucalyptus, Festuca, Fragaria, Galanthus, Glycine, Gossypium, Helianthus, Hevea, Hyoscyamus, Jatropha, Lactuca, Linum, Lupinus, Lycopersicon, Lycopodium, Manihot, Medicago, Mentha, Musa, Nicotiana, Papaver, Parthenium, Pennisetum, Petunia, Phalaris, Phleum, Pinus, Poa, Poinsettia, Populus, Rauwolfia, Ricinus, Rosa, Saccharum, Salix, Sanguinaria, Scopolia, Solanum, Spinacea, Tanacetum, Taxus, Theobroma, Uniola, Veratrum, Vinca, and Vitis.

[0069] Plants important or interesting for agriculture, horticulture, biomass production (for production of liquid fuel molecules and other chemicals), and/or forestry may be used in the methods of the disclosure. Non-limiting examples include, for instance, Populus balsamifera (poplar), cotton (Gossypium barbadense, Gossypium hirsutum), Helianthus annuus (sunflower), Medicago sativa (alfalfa), Beta vulgaris (sugarbeet), Erianthus spp., Salix spp. (willow), Eucalyptus spp. (eucalyptus, including E. grandis (and its hybrids, known as “urograndis”), E. globulus, E. camaldulensis, E. tereticornis, E. viminalis, E. nitens, E. saligna and E. urophylla), Carthamus tinctorius (safflower), Jatropha curcas (jatropha), Ricinus communis (castor), Manihot esculenta (cassava), Solanum lycopersicum (tomato), Lactuca sativa (lettuce), Phaseolus vulgaris (green beans), Phaseolus limensis (lima beans), Lathyrus spp. (peas), Solanum tuberosum (potato), Brassica spp. (B. napus (canola), B. rapa, B. juncea), Brassica oleracea (broccoli, cauliflower, brussel sprouts), Camellia sinensis (tea), Fragaria ananassa (strawberry), Theobroma cacao (cocoa), Coffea arabica (coffee), Vitis vinifera (grape), Ananas comosus (pineapple), Capsicum annum (hot & sweet pepper), Arachis hypogaea (peanuts), Ipomoea batatus (sweet potato), Cocos nucifera (coconut), Citrus spp. (citrus trees), Persea americana (avocado), fig (Ficus casica), guava (Psidium guajava), mango (Mangifera indica), olive (Olea europaea), Carica papaya (papaya), Anacardium occidentale (cashew), Macadamia integrifolia (macadamia tree), Prunus amygdalus (almond), Allium cepa (onion), Cucumis melo (musk melon), Cucumis sativus (cucumber), Cucumis cantalupensis (cantaloupe), Cucurbita maxima (squash), Cucurbita moschata (squash), Spinacea oleracea (spinach), Citrullus lanatus (watermelon), Abelmoschus esculentus (okra), Solanum melongena (eggplant), Cyamopsis tetragonoloba (guar bean), Ceratonia siliqua (locust bean), Trigonella foenum-graecum (fenugreek), Vigna radiata (mung bean), Vigna unguiculata (cowpea), Vicia faba (fava bean), Cicer arietinum (chickpea), Lens culinaris (lentil), Papaver somniferum (opium poppy), Papaver orientale, Taxus baccata, Taxus brevifolia, Artemisia annua, Cannabis sativa, Camptotheca acuminate, Catharanthus roseus, Vinca rosea, Cinchona officinalis, Colchicum autumnale, Veratrum californica, Digitalis lanata, Digitalis purpurea, Dioscorea spp., Andrographis paniculata, Atropa belladonna, Datura stomonium, Berberis spp., Cephalotaxus spp., Ephedra sinica, Ephedra spp., Erythroxylum coca, Galanthus wornorii, Scopolia spp., Lycopodium serratum (Huperzia serrata), Lycopodium spp., Rauwolfia serpentina, Rauwolfia spp., Sanguinaria canadensis, Hyoscyamus spp., Calendula officinalis, Chrysanthemum parthenium, Coleus forskohlii, Tanacetum parthenium, Parthenium argentatum (guayule), Hevea spp. (rubber), Mentha spicata (mint), Mentha piperita (mint), Bixa orellana (achiote), Alstroemeria spp., Rosa spp. (rose), Rhododendron spp. (azalea), Macrophylla hydrangea (hydrangea), Hibiscus rosasanensis (hibiscus), Tulipa spp. (tulips), Narcissus spp. (daffodils), Petunia hybrida (petunias), Dianthus caryophyllus (carnation), Euphorbia pulcherrima (poinsettia), chrysanthemum, Nicotiana tabacum (tobacco), Lupinus albus (lupin), Populus tremuloides (aspen), Pinus spp. (pine), Abies spp. (fir), Acer spp. (maple), and conifers.

[0070] Conifers may be used in the methods of the present disclosure and include, for example, pines such as loblolly pine (Pinus taeda), slash pine (Pinus elliotii), ponderosa pine (Pinus ponderosa), lodgepole pine (Pinus contorta), and Monterey pine (Pinus radiata); Douglas-fir (Pseudotsuga menziesii); Eastern or Canadian hemlock (Tsuga canadensis); Western hemlock (Tsuga heterophylla); Mountain hemlock (Tsuga mertensiana); Tamarack or Larch (Larix occidentalis); Sitka spruce (Picea glauca); redwood (Sequoia sempervirens); true firs such as silver fir (Abies amabilis) and balsam fir (Abies balsamea); and cedars such as Western red cedar (Thuja plicata) and Alaska yellow-cedar (Chamaecyparis nootkatensis).

[0071] In specific aspects, plants useful in the methods of the present disclosure are crop plants (for example, alfalfa, sunflower, Brassica, soybean, cotton, safflower, peanut, tobacco, etc.). Other plants useful in the methods of the present disclosure include cassava, common bean, cowpea, tomato, potato, beet, grape, Eucalyptus, poplar, pine, douglas fir, citrus, papaya, cacao, cucumber, apple, Capsicum, and melon.

[0072] Additional heterologous coding sequences, heterologous polynucleotides, and polynucleotides of interest may be used in the methods of the disclosure for varying the phenotype of a plant. Various changes in phenotype are of interest including modifying expression of a gene in a plant, altering a plant's pathogen or insect defense mechanism, increasing a plant's tolerance to herbicides, altering plant development to respond to environmental stress, modulating the plant's response to salt, temperature (hot and cold), drought and the like. These results can be achieved by the expression of a heterologous nucleotide sequence of interest comprising an appropriate gene product. In specific aspects, the heterologous nucleotide sequence of interest is an endogenous plant sequence whose expression level is increased in the plant or plant part. Results can be achieved by providing for altered expression of one or more endogenous gene products, particularly hormones, receptors, signaling molecules, enzymes, transporters or cofactors or by affecting nutrient uptake in the plant. These changes result in a change in phenotype of the transformed plant.

[0073] General categories of heterologous polynucleotides or nucleotide sequences of interest for use in the methods of the present disclosure include, for example, those genes involved in information, such as zinc fingers, those involved in communication, such as kinases and those involved in housekeeping, such as heat shock proteins. More specific categories of transgenes (heterologous polynucleotides or nucleotide sequences of interest), for example, include genes encoding important traits for agronomics, insect resistance, disease resistance, herbicide resistance, environmental stress resistance (altered tolerance to cold, salt, drought, etc.) and grain characteristics. Still other categories of transgenes include genes for inducing expression of exogenous products such as enzymes, cofactors, and hormones from plants and other eukaryotes as well as prokaryotic organisms. It is recognized that any gene or polynucleotide of interest can be operably linked to a promoter and expressed in a plant using the methods disclosed herein.

[0074] Many agronomic traits can affect “yield”, including without limitation, plant height, pod number, pod position on the plant, number of internodes, incidence of pod shatter, grain size, efficiency of nodulation and nitrogen fixation, efficiency of nutrient assimilation, resistance to biotic and abiotic stress, carbon assimilation, plant architecture, resistance to lodging, percent seed germination, seedling vigor, and juvenile traits. Other traits that can affect yield include, efficiency of germination (including germination in stressed conditions), growth rate (including growth rate in stressed conditions), ear number, seed number per ear, seed size, composition of seed (starch, oil, protein) and characteristics of seed fill. Also of interest is the generation of transgenic plants that demonstrate desirable phenotypic properties that may or may not confer an increase in overall plant yield. Such properties include enhanced plant morphology, plant physiology or improved components of the mature seed harvested from the transgenic plant.

[0075] “Increased yield” of a transgenic plant of the present disclosure may be evidenced and measured in a number of ways, including test weight, seed number per plant, seed weight, seed number per unit area (i.e. seeds, or weight of seeds, per acre), bushels per acre, tons per acre, kilo per hectare. For example, maize yield may be measured as production of shelled corn kernels per unit of production area, e.g. in bushels per acre or metric tons per hectare, often reported on a moisture adjusted basis, e.g., at 15.5% moisture. Increased yield may result from improved utilization of key biochemical compounds, such as nitrogen, phosphorous and carbohydrate, or from improved tolerance to environmental stresses, such as cold, heat, drought, salt, and attack by pests or pathogens. Trait-enhancing recombinant DNA may also be used to provide transgenic plants having improved growth and development, and ultimately increased yield, as the result of modified expression of plant growth regulators or modification of cell cycle or photosynthesis pathways.

[0076] An “enhanced trait” as used herein describing the aspects of the present disclosure includes improved or enhanced water use efficiency or drought tolerance, osmotic stress tolerance, high salinity stress tolerance, heat stress tolerance, enhanced cold tolerance, including cold germination tolerance, increased yield, improved seed quality, enhanced nitrogen use efficiency, early plant growth and development, late plant growth and development, enhanced seed protein, and enhanced seed oil production.

[0077] Multiple genes of interest (heterologous polynucleotides or nucleotide sequences of interest) can be used in the methods of the disclosure and expressed in a plant, for example insect resistance traits herbicide resistance, fungal resistance, virus resistance, stress tolerance, disease resistance, male sterility, stalk strength, and the like) or output traits (e.g., increased yield, modified starches, improved oil profile, balanced amino acids, high lysine or methionine, increased digestibility, improved fiber quality, drought resistance, nutritional enhancement, and the like).

[0078] In an aspect, the methods of the disclosure can be used to transform vegetative plant organs and their composite tissues including but are not limited to leaf explants, leaf primordia, stipule, cotyledons, cotyledonary nodes, mesocotyl, stem explants, primary roots, lateral secondary roots, root segments, buds, and meristems, including but not limited to apical meristems, root meristems, secondary meristems, axillary meristems, and floral meristems with insect resistance genes (heterologous polynucleotides or nucleotide sequences of interest) that encode resistance to pests that have great yield drag such as rootworm, cutworm, European corn borer and the like. Such genes (heterologous polynucleotides or nucleotide sequences of interest) include, for example, Bacillus thuringiensis toxic protein genes, U.S. Pat. Nos. 5,366,892; 5,747,450; 5,736,514; 5,723,756; 5,593,881 and Geiser, et al., (1986) Gene 48:109, the disclosures of which are herein incorporated by reference in their entirety. Genes (heterologous polynucleotides or nucleotide sequences of interest) encoding disease resistance traits can also be used in the methods of the disclosure including, for example, detoxification genes, such as those which detoxify fumonisin (U.S. Pat. No. 5,792,931); avirulence (avr) and disease resistance (R) genes (Jones, et al., (1994) Science 266:789; Martin, et al., (1993) Science 262:1432; and Mindrinos, et al., (1994) Cell 78:1089), herein incorporated by reference in their entirety.

[0079] Herbicide resistance traits (heterologous polynucleotides or nucleotide sequences of interest) can be used in the methods of the disclosure including genes coding for resistance to herbicides that act to inhibit the action of acetolactate synthase (ALS), in particular the sulfonylurea-type herbicides (e.g., the acetolactate synthase (ALS) gene containing mutations leading to such resistance, in particular the S4 and/or Hra mutations), genes coding for resistance to herbicides that act to inhibit action of glutamine synthase, such as phosphinothricin or basta (e.g., the bar gene), genes coding for resistance to glyphosate (e.g., the EPSPS gene and the GAT gene; see, for example, US Patent Application Publication Number 2004/0082770 and WO 03/092360, herein incorporated by reference in their entirety) or other such genes known in the art. The bar gene encodes resistance to the herbicide basta, the nptll gene encodes resistance to the antibiotics kanamycin and geneticin and the ALS-gene mutants encode resistance to the herbicide chlorsulfuron any and all of which can be operably linked to a promoter and used in the methods of the disclosure.

[0080] Glyphosate resistance is imparted by mutant 5-enolpyruvl-3-phosphikimate synthase (EPSPS) and aroA genes which can be operably linked to a promoter and used in the methods of the disclosure. See, for example, U.S. Pat. No. 4,940,835 to Shah, et al., which discloses the nucleotide sequence of a form of EPSPS which can confer glyphosate resistance. U.S. Pat. No. 5,627,061 to Barry, et al., also describes genes encoding EPSPS enzymes which can be operably linked to a promoter and used in the methods of the disclosure. See also, U.S. Pat. Nos. 6,248,876 B1; 6,040,497; 5,804,425; 5,633,435; 5,145,783; 4,971,908; 5,312,910; 5,188,642; 4,940,835; 5,866,775; 6,225,114 B 1; 6,130,366; 5,310,667; 4,535,060; 4,769,061; 5,633,448; 5,510,471; Re. 36,449; RE 37,287 E and 5,491,288 and international publications WO 97/04103; WO 97/04114; WO 00/66746; WO 01/66704; WO 00/66747 and WO 00/66748, which are incorporated herein by reference in their entirety. Glyphosate resistance is also imparted to plants that express a gene that encodes a glyphosate oxido-reductase enzyme as described more fully in U.S. Pat. Nos. 5,776,760 and 5,463,175, which are incorporated herein by reference in their entirety. Glyphosate resistance can also be imparted to plants by the over expression of genes encoding glyphosate N-acetyltransferase. See, for example, U.S. patent application Ser. Nos. 11/405,845 and 10/427,692, herein incorporated by reference in their entirety. Sterility genes (heterologous polynucleotides or nucleotide sequences of interest) can be used in the methods of the disclosure to provide an alternative to physical detasseling. Examples of genes used in such ways include male tissue-preferred genes and genes with male sterility phenotypes such as QM, described in U.S. Pat. No. 5,583,210, herein incorporated by reference in its entirety. Other genes which can be operably linked to a promoter and used in the methods of the disclosure include kinases and those encoding compounds toxic to either male or female gametophytic development.

[0081] Commercial traits can also be produced using the methods of the disclosure that could increase for example, starch for ethanol production, or provide expression of proteins. Another important commercial use of transformed plants is the production of polymers and bioplastics such as described in U.S. Pat. No. 5,602,321, herein incorporated by reference in its entirety. Genes such as β-Ketothiolase, PHBase (polyhydroxybutyrate synthase), and acetoacetyl-CoA reductase which can be operably linked to a promoter and used in the methods of the disclosure (see, Schubert, et al., (1988) J. Bacterial. 170:5837-5847, herein incorporated by reference in its entirety) facilitate expression of polyhydroxyalkanoates (PHAs).

[0082] Numerous trait genes (heterologous polynucleotides or nucleotide sequences of interest) are known in the art and can be used in the methods disclosed herein. By way of illustration, without intending to be limiting, trait genes (heterologous polynucleotides) that confer resistance to insects or diseases, trait genes (heterologous polynucleotides) that confer resistance to a herbicide, trait genes (heterologous polynucleotides) that confer or contribute to an altered grain characteristic, such as altered fatty acids, altered phosphorus content, altered carbohydrates or carbohydrate composition, altered antioxidant content or composition, or altered essential seed amino acids content or composition are examples of the types of trait genes (heterologous polynucleotides) which can be operably linked to a promoter for expression in plants transformed by the methods disclosed herein. Additional genes known in the art may be included in the expression cassettes useful in the methods disclosed herein. Non-limiting examples include genes that create a site for site specific DNA integration, genes that affect abiotic stress resistance (including but not limited to flowering, ear and seed development, enhancement of nitrogen utilization efficiency, altered nitrogen responsiveness, drought resistance or tolerance, cold resistance or tolerance, and salt resistance or tolerance) and increased yield under stress, or other genes and transcription factors that affect plant growth and agronomic traits such as yield, flowering, plant growth and/or plant structure.

[0083] The methods of the disclosure can be used to transform a plant with a heterologous nucleotide sequence that is an antisense sequence for a targeted gene. As used herein, “antisense orientation” includes reference to a polynucleotide sequence that is operably linked to a promoter in an orientation where the antisense strand is transcribed. The antisense strand is sufficiently complementary to an endogenous transcription product such that translation of the endogenous transcription product is often inhibited. “Operably linked” refers to the association of two or more nucleic acid fragments on a single nucleic acid fragment so that the function of one is affected by the other. For example, a promoter is operably linked with a coding sequence when it is capable of affecting the expression of that coding sequence (i.e., that the coding sequence is under the transcriptional control of the promoter). Coding sequences can be operably linked to regulatory sequences in sense or antisense orientation.

[0084] The terminology “antisense DNA nucleotide sequence” is intended to mean a sequence that is in inverse orientation to the 5′-to-3′ normal orientation of that nucleotide sequence. When delivered into a plant cell, expression of the antisense DNA sequence prevents normal expression of the DNA nucleotide sequence for the targeted gene. The antisense nucleotide sequence encodes an RNA transcript that is complementary to and capable of hybridizing to the endogenous messenger RNA (mRNA) produced by transcription of the DNA nucleotide sequence for the targeted gene. In this case, production of the native protein encoded by the targeted gene is inhibited to achieve a desired phenotypic response. Modifications of the antisense sequences may be made as long as the sequences hybridize to and interfere with expression of the corresponding mRNA. In this manner, antisense constructions having 70%, 80%, 85% sequence identity to the corresponding antisense sequences may be used. Furthermore, portions of the antisense nucleotides may be used to disrupt the expression of the target gene. Generally, sequences of at least 50 nucleotides, 100 nucleotides, 200 nucleotides or greater may be used. Thus, the promoter sequences disclosed herein may be operably linked to antisense DNA sequences to reduce or inhibit expression of a native protein in the plant.

[0085] “RNAi” refers to a series of related techniques to reduce the expression of genes (see, for example, U.S. Pat. No. 6,506,559, herein incorporated by reference in its entirety). Older techniques referred to by other names are now thought to rely on the same mechanism but are given different names in the literature. These include “antisense inhibition,” the production of antisense RNA transcripts capable of suppressing the expression of the target protein and “co-suppression” or “sense-suppression,” which refer to the production of sense RNA transcripts capable of suppressing the expression of identical or substantially similar foreign or endogenous genes (U.S. Pat. No. 5,231,020, incorporated herein by reference in its entirety). Such techniques rely on the use of constructs resulting in the accumulation of double stranded RNA with one strand complementary to the target gene to be silenced. The methods of the disclosure may be used to express constructs that will result in RNA interference including microRNAs and siRNAs.

[0086] As used herein, the terms “promoter” or “transcriptional initiation region” mean a regulatory region of DNA usually comprising a TATA box or a DNA sequence capable of directing RNA polymerase II to initiate RNA synthesis at the appropriate transcription initiation site for a particular coding sequence. A promoter may additionally comprise other recognition sequences generally positioned upstream or 5′ to the TATA box or the DNA sequence capable of directing RNA polymerase II to initiate RNA synthesis, referred to as upstream promoter elements, which influence the transcription initiation rate. It is recognized that having identified the nucleotide sequences for the promoter regions disclosed herein, it is within the state of the art to isolate and identify further promoters in the 5′ untranslated region upstream from the particular promoter regions identified herein. Additionally, chimeric promoters may be provided. Such chimeras include portions of the promoter sequence fused to fragments and/or variants of heterologous transcriptional regulatory regions. Thus, the promoter regions disclosed herein can comprise upstream promoters such as, those responsible for tissue and temporal expression of the coding sequence, enhancers and the like.

[0087] As used herein, the term “regulatory element” also refers to a sequence of DNA, usually, but not always, upstream (5′) to the coding sequence of a structural gene, which includes sequences which control the expression of the coding region by providing the recognition for RNA polymerase and/or other factors required for transcription to start at a particular site. An example of a regulatory element that provides for the recognition for RNA polymerase or other transcriptional factors to ensure initiation at a particular site is a promoter element. A promoter element comprises a core promoter element, responsible for the initiation of transcription, as well as other regulatory elements that modify gene expression. It is to be understood that nucleotide sequences, located within introns or 3′ of the coding region sequence may also contribute to the regulation of expression of a coding region of interest. Examples of suitable introns include, but are not limited to, the maize IVS6 intron, or the maize actin intron. A regulatory element may also include those elements located downstream (3′) to the site of transcription initiation, or within transcribed regions, or both. In the context of the present disclosure a post-transcriptional regulatory element may include elements that are active following transcription initiation, for example translational and transcriptional enhancers, translational and transcriptional repressors and mRNA stability determinants.

[0088] A “heterologous nucleotide sequence”, “heterologous polynucleotide of interest”, or “heterologous polynucleotide” as used throughout the disclosure, is a sequence that is not naturally occurring with or operably linked to a promoter sequence. While this nucleotide sequence is heterologous to the promoter sequence, it may be homologous or native or heterologous or foreign to the plant host. Likewise, the promoter sequence may be homologous or native or heterologous or foreign to the plant host and/or the polynucleotide of interest.

[0089] It is recognized that to increase transcription levels, enhancers may be. Enhancers are nucleotide sequences that act to increase the expression of a promoter region. Enhancers are known in the art and include the SV40 enhancer region, the 35S enhancer element and the like. Some enhancers are also known to alter normal promoter expression patterns, for example, by causing a promoter to be expressed constitutively when without the enhancer, the same promoter is expressed only in one specific tissue or a few specific tissues.

[0090] Modifications of promoter sequences can provide for a range of expression of a heterologous nucleotide sequence. Thus, they may be modified to be weak promoters or strong promoters. Generally, a “weak promoter” means a promoter that drives expression of a coding sequence at a low level. A “low level” of expression is intended to mean expression at levels of about 1/10,000 transcripts to about 1/100,000 transcripts to about 1/500,000 transcripts. Conversely, a strong promoter drives expression of a coding sequence at a high level, or at about 1/10 transcripts to about 1/100 transcripts to about 1/1,000 transcripts.

[0091] The transformation methods disclosed herein are useful in the genetic manipulation of any plant, thereby resulting in a change in phenotype of the transformed plant.

[0092] The term “operably linked” means that the transcription or translation of a heterologous nucleotide sequence is under the influence of a promoter sequence. In this manner, the nucleotide sequences for the promoters may be provided in expression cassettes along with heterologous nucleotide sequences of interest for expression in the plant of interest, more particularly for expression in the reproductive tissue of the plant.

[0093] In one aspect of the disclosure, expression cassettes comprise a transcriptional initiation region comprising a promoter nucleotide sequence or variants or fragments thereof, operably linked to a morphogenic gene and/or a heterologous nucleotide sequence. Such an expression cassette can be provided with a plurality of restriction sites for insertion of the nucleotide sequence to be under the transcriptional regulation of the regulatory regions. The expression cassette may additionally contain selectable marker genes as well as 3′ termination regions.

[0094] The expression cassette can include, in the 5′-3′ direction of transcription, a transcriptional initiation region (i.e., a promoter, or variant or fragment thereof), a translational initiation region, a heterologous nucleotide sequence of interest, a translational termination region and optionally, a transcriptional termination region functional in the host organism. The regulatory regions (i.e., promoters, transcriptional regulatory regions, and translational termination regions) and/or the polynucleotide of the aspects may be native/analogous to the host cell or to each other. Alternatively, the regulatory regions and/or the polynucleotide of the aspects may be heterologous to the host cell or to each other. As used herein, “heterologous” in reference to a sequence is a sequence that originates from a foreign species or, if from the same species, is substantially modified from its native form in composition and/or genomic locus by deliberate human intervention. For example, a promoter operably linked to a heterologous polynucleotide is from a species different from the species from which the polynucleotide was derived or, if from the same/analogous species, one or both are substantially modified from their original form and/or genomic locus or the promoter is not the native promoter for the operably linked polynucleotide. The termination region may be native with the transcriptional initiation region, may be native with the operably linked DNA sequence of interest, may be native with the plant host, or may be derived from another source (i.e., foreign or heterologous to the promoter, the DNA sequence being expressed, the plant host, or any combination thereof). Convenient termination regions are available from the Ti-plasmid of A. tumefaciens, such as the octopine synthase and nopaline synthase termination regions. See also, Guerineau, et al., (1991) Mol. Gen. Genet. 262:141-144; Proudfoot, (1991) Cell 64:671-674; Sanfacon, et al., (1991) Genes Dev. 5:141-149; Mogen, et al., (1990) Plant Cell 2:1261-1272; Munroe, et al., (1990) Gene 91:151-158; Ballas, et al., (1989) Nucleic Acids Res. 17:7891-7903; and Joshi, et al., (1987) Nucleic Acid Res. 15:9627-9639, herein incorporated by reference in their entirety.

[0095] The expression cassette useful in the methods of the disclosure may also contain at least one additional nucleotide sequence for a gene, heterologous nucleotide sequence, heterologous polynucleotide of interest, or heterologous polynucleotide to be co-transformed into the organism. Alternatively, the additional nucleotide sequence(s) can be provided on another expression cassette.

[0096] Where appropriate, the nucleotide sequences may be optimized for increased expression in the transformed plant. That is, these nucleotide sequences can be synthesized using plant preferred codons for improved expression. See, for example, Campbell and Gowri, (1990) Plant Physiol. 92:1-11, herein incorporated by reference in its entirety, for a discussion of host-preferred codon usage. Methods are available in the art for synthesizing plant-preferred genes. See, for example, U.S. Pat. Nos. 5,380,831, 5,436,391 and Murray, et al., (1989) Nucleic Acids Res. 17:477-498, herein incorporated by reference in their entirety.

[0097] Additional sequence modifications are known to enhance gene expression in a cellular host. These include elimination of sequences encoding spurious polyadenylation signals, exon-intron splice site signals, transposon-like repeats and other such well-characterized sequences that may be deleterious to gene expression. The G-C content of the heterologous nucleotide sequence may be adjusted to levels average for a given cellular host, as calculated by reference to known genes expressed in the host cell. When possible, the sequence is modified to avoid predicted hairpin secondary mRNA structures.

[0098] The expression cassettes may additionally contain 5′ leader sequences. Such leader sequences can act to enhance translation. Translation leaders are known in the art and include, without limitation: picornavirus leaders, for example, EMCV leader (Encephalomyocarditis 5′ noncoding region) (Elroy-Stein, et al., (1989) Proc. Nat. Acad. Sci. USA 86:6126-6130); potyvirus leaders, for example, TEV leader (Tobacco Etch Virus) (Allison, et al., (1986) Virology 154:9-20); MDMV leader (Maize Dwarf Mosaic Virus); human immunoglobulin heavy-chain binding protein (BiP) (Macejak, et al., (1991) Nature 353:90-94); untranslated leader from the coat protein mRNA of alfalfa mosaic virus (AMV RNA 4) (Jobling, et al., (1987) Nature 325:622-625); tobacco mosaic virus leader (TMV) (Gallie, et al., (1989) Molecular Biology of RNA, pages 237-256) and maize chlorotic mottle virus leader (MCMV) (Lommel, et al., (1991) Virology 81:382-385), herein incorporated by reference in their entirety. See, also, Della-Cioppa, et al., (1987) Plant Physiology 84:965-968, herein incorporated by reference in its entirety. Methods known to enhance mRNA stability can also be utilized, for example, introns, such as the maize Ubiquitin intron (Christensen and Quail, (1996) Transgenic Res. 5:213-218; Christensen, et al., (1992) Plant Molecular Biology 18:675-689) or the maize Adhl intron (Kyozuka, et al., (1991) Mol. Gen. Genet. 228:40-48; Kyozuka, et al., (1990)Maydica 35:353-357) and the like, herein incorporated by reference in their entirety.

[0099] The DNA expression cassettes or constructs useful in the methods of the disclosure can also include further enhancers, either translation or transcription enhancers, as may be required. These enhancer regions are well known to persons skilled in the art and can include the ATG initiation codon and adjacent sequences. The initiation codon must be in phase with the reading frame of the coding sequence to ensure translation of the entire sequence. The translation control signals and initiation codons can be from a variety of origins, both natural and synthetic. Translational initiation regions may be provided from the source of the transcriptional initiation region, or from the structural gene. The sequence can also be derived from the regulatory element selected to express the gene and can be specifically modified to increase translation of the mRNA. It is recognized that to increase transcription levels enhancers may be utilized in combination with the promoter regions of the aspects. Enhancers are known in the art and include the SV40 enhancer region, the 35S enhancer element, and the like.

[0100] In preparing the expression cassette, the various DNA fragments may be manipulated, to provide for the DNA sequences in the proper orientation and, as appropriate, in the proper reading frame. Toward this end, adapters or linkers may be employed to join the DNA fragments or other manipulations may be involved to provide for convenient restriction sites, removal of superfluous DNA, removal of restriction sites or the like. For this purpose, in vitro mutagenesis, primer repair, restriction, annealing, resubstitutions, for example, transitions and transversions, may be involved.

[0101] Reporter genes or selectable marker genes may also be included in the expression cassettes useful in the methods of the present disclosure. Examples of suitable reporter genes known in the art can be found in, for example, Jefferson, et al., (1991) in Plant Molecular Biology Manual, ed. Gelvin, et al., (Kluwer Academic Publishers), pp. 1-33; DeWet, et al., (1987) Mol. Cell. Biol. 7:725-737; Goff, et al., (1990) EMBO J. 9:2517-2522; Kain, et al., (1995) Bio Techniques 19:650-655 and Chiu, et al., (1996) Current Biology 6:325-330, herein incorporated by reference in their entirety.

[0102] Selectable marker genes for selection of transformed cells or tissues can include genes that confer antibiotic resistance or resistance to herbicides. Examples of suitable selectable marker genes include, but are not limited to, genes encoding resistance to chloramphenicol (Herrera Estrella, et al., (1983) EMBO 1 2:987-992); methotrexate (Herrera Estrella, et al., (1983) Nature 303:209-213; Meijer, et al., (1991) Plant Mol. Biol. 16:807-820); hygromycin (Waldron, et al., (1985) Plant Mol. Biol. 5:103-108 and Zhijian, et al., (1995) Plant Science 108:219-227); streptomycin (Jones, et al., (1987) Mol. Gen. Genet. 210:86-91); spectinomycin (Bretagne-Sagnard, et al., (1996) Transgenic Res. 5:131-137); bleomycin (Hille, et al., (1990) Plant Mol. Biol. 7:171-176); sulfonamide (Guerineau, et al., (1990) Plant Mol. Biol. 15:127-36); bromoxynil (Stalker, et al., (1988) Science 242:419-423); glyphosate (Shaw, et al., (1986) Science 233:478-481 and U.S. patent application Ser. Nos. 10/004,357 and 10/427,692); phosphinothricin (DeBlock, et al., (1987) EMBO J. 6:2513-2518), herein incorporated by reference in their entirety.

[0103] Other genes that could serve utility in the recovery of transgenic events would include, but are not limited to, examples such as GUS (beta-glucuronidase; Jefferson, (1987) Plant Mol. Biol. Rep. 5:387), GFP (green fluorescence protein; Chalfie, et al., (1994) Science 263:802), luciferase (Riggs, et al., (1987) Nucleic Acids Res. 15(19):8115 and Luehrsen, et al., (1992) Methods Enzymol. 216:397-414) and the maize genes encoding for anthocyanin production (Ludwig, et al., (1990) Science 247:449), herein incorporated by reference in their entirety.

[0104] As used herein, “vector” refers to a DNA molecule such as a plasmid, cosmid or bacterial phage for introducing a nucleotide construct, for example, an expression cassette or construct, into a host cell. Cloning vectors typically contain one or a small number of restriction endonuclease recognition sites at which foreign DNA sequences can be inserted in a determinable fashion without loss of essential biological function of the vector, as well as a marker gene that is suitable for use in the identification and selection of cells transformed with the cloning vector. Marker genes typically include genes that provide tetracycline resistance, hygromycin resistance or ampicillin resistance.

[0105] The methods of the disclosure involve introducing a polypeptide or polynucleotide into a plant. As used herein, “introducing” means presenting to the plant the polynucleotide or polypeptide in such a manner that the sequence gains access to the interior of a cell of the plant. The methods of the disclosure do not depend on a particular method for introducing a sequence into a plant, only that the polynucleotide or polypeptides gains access to the interior of at least one cell of the plant. Methods for introducing polynucleotide or polypeptides into plants are known in the art including, but not limited to, stable transformation methods, transient transformation methods and virus-mediated methods.

[0106] A “stable transformation” is a transformation in which the nucleotide construct introduced into a plant integrates into the genome of the plant and is capable of being inherited by the progeny thereof. “Transient transformation” means that a polynucleotide is introduced into the plant and does not integrate into the genome of the plant or a polypeptide is introduced into a plant.

[0107] Transformation protocols as well as protocols for introducing nucleotide sequences into plants may vary depending on the type of plant or plant cell, i.e., monocot or dicot, targeted for transformation. Suitable methods of introducing nucleotide sequences into plant cells and subsequent insertion into the plant genome include microinjection (Crossway, et al., (1986) Biotechniques 4:320-334), electroporation (Riggs, et al., (1986) Proc. Natl. Acad. Sci. USA 83:5602-5606), Agrobacterium-mediated transformation (Townsend, et al., U.S. Pat. No. 5,563,055 and Zhao, et al., U.S. Pat. No. 5,981,840), direct gene transfer (Paszkowski, et al., (1984) EMBO 1 3:2717-2722) and ballistic particle acceleration (see, for example, U.S. Pat. Nos. 4,945,050; 5,879,918; 5,886,244; 5,932,782; Tomes, et al., (1995) in Plant Cell, Tissue, and Organ Culture: Fundamental Methods, ed. Gamborg and Phillips (Springer-Verlag, Berlin); McCabe, et al., (1988) Biotechnology 6:923-926) and Lecl transformation (WO 00/28058). Also see, Weissinger, et al., (1988) Ann. Rev. Genet. 22:421-477; Sanford, et al., (1987) Particulate Science and Technology 5:27-37 (onion); Christou, et al., (1988) Plant Physiol. 87:671-674 (soybean); McCabe, et al., (1988) Bio/Technology 6:923-926 (soybean); Finer and McMullen, (1991) In Vitro Cell Dev. Biol. 27P:175-182 (soybean); Singh, et al., (1998) Theor. Appl. Genet. 96:319-324 (soybean); Datta, et al., (1990) Biotechnology 8:736-740 (rice); Klein, et al., (1988) Proc. Natl. Acad. Sci. USA 85:4305-4309 (maize); Klein, et al., (1988) Biotechnology 6:559-563 (maize); U.S. Pat. Nos. 5,240,855; 5,322,783 and 5,324,646; Klein, et al., (1988) Plant Physiol. 91:440-444 (maize); Fromm, et al., (1990) Biotechnology 8:833-839 (maize); Hooykaas-Van Slogteren, et al., (1984) Nature (London) 311:763-764; U.S. Pat. No. 5,736,369 (cereals); Bytebier, et al., (1987) Proc. Natl. Acad. Sci. USA 84:5345-5349 (Liliaceae); De Wet, et al., (1985) in The Experimental Manipulation of Ovule Tissues, ed. Chapman, et al., (Longman, New York), pp. 197-209 (pollen); Kaeppler, et al., (1990) Plant Cell Reports 9:415-418 and Kaeppler, et al., (1992) Theor. Appl. Genet. 84:560-566 (whisker-mediated transformation); D'Halluin, et al., (1992) Plant Cell 4:1495-1505 (electroporation); Li, et al., (1993) Plant Cell Reports 12:250-255 and Christou and Ford, (1995) Annals of Botany 75:407-413 (rice); Osjoda, et al., (1996) Nature Biotechnology 14:745-750 (maize via Agrobacterium tumefaciens), all of which are herein incorporated by reference in their entirety. Methods and compositions for rapid plant transformation are also found in U.S. 2017/0121722, herein incorporated in its entirety by reference. Vectors useful in plant transformation are found in U.S. patent application Ser. No. 15/765,521, herein incorporated by reference in its entirety.

[0108] In specific aspects, the DNA expression cassettes or constructs can be provided to a plant using a variety of transient transformation methods. Such transient transformation methods include, but are not limited to, viral vector systems and the precipitation of the polynucleotide in a manner that precludes subsequent release of the DNA. Thus, transcription from the particle-bound DNA can occur, but the frequency with which it is released to become integrated into the genome is greatly reduced. Such methods include the use of particles coated with polyethylenimine (PEI; Sigma #P3143).

[0109] In other aspects, the polynucleotide may be introduced into plants by contacting plants with a virus or viral nucleic acids. Generally, such methods involve incorporating a nucleotide construct within a viral DNA or RNA molecule. Methods for introducing polynucleotides into plants and expressing a protein encoded therein, involving viral DNA or RNA molecules, are known in the art. See, for example, U.S. Pat. Nos. 5,889,191, 5,889,190, 5,866,785, 5,589,367, 5,316,931 and Porta, et al., (1996) Molecular Biotechnology 5:209-221, herein incorporated by reference in their entirety.

[0110] The cells that have been transformed may be grown into plants in accordance with conventional ways. See, for example, McCormick, et al., (1986) Plant Cell Reports 5:81-84, herein incorporated by reference in its entirety. These plants may then be grown, and either pollinated with the same transformed strain or different strains, and the resulting progeny having expression of the desired phenotypic characteristic identified. Two or more generations may be grown to ensure that expression of the desired phenotypic characteristic is stably maintained and inherited and then seeds harvested to ensure expression of the desired phenotypic characteristic has been achieved. In this manner, the present disclosure provides transformed seed (also referred to as “transgenic seed”) having a nucleotide construct, for example, an expression cassette, stably incorporated into its genome.

[0111] There are a variety of methods for the regeneration of plants from plant tissue. The particular method of regeneration will depend on the starting plant tissue and the particular plant species to be regenerated. The regeneration, development and cultivation of plants from single plant protoplast transformants or from various transformed explants is well known in the art (Weissbach and Weissbach, (1988) In: Methods for Plant Molecular Biology, (Eds.), Academic Press, Inc., San Diego, Calif., herein incorporated by reference in its entirety). This regeneration and growth process typically includes the steps of selection of transformed cells, culturing those individualized cells through the usual stages of embryonic development through the rooted plantlet stage. Transgenic embryos and seeds are similarly regenerated. The resulting transgenic rooted shoots are thereafter planted in an appropriate plant growth medium such as soil. Preferably, the regenerated plants are self-pollinated to provide homozygous transgenic plants. Otherwise, pollen obtained from the regenerated plants is crossed to seed-grown plants of agronomically important lines. Conversely, pollen from plants of these important lines is used to pollinate regenerated plants. A transgenic plant of the aspects containing a desired polynucleotide is cultivated using methods well known to one skilled in the art.

[0112] Methods are known in the art for the targeted insertion of a polynucleotide at a specific location in the plant genome. The insertion of the polynucleotide at a desired genomic location is achieved using a site-specific recombination system. See, for example, U.S. Pat. No. 9,222,098 B2, U.S. Pat. No. 7,223,601 B2, U.S. Pat. No. 7,179,599 B2, and U.S. Pat. No. 6,911,575 B1, all of which are herein incorporated by reference in their entirety. Briefly, a polynucleotide of interest, flanked by two non-identical recombination sites, can be contained in a T-DNA transfer cassette. The T-DNA transfer cassette is introduced into a plant having stably incorporated into its genome a target site which is flanked by two non-identical recombination sites that correspond to the sites of the transfer cassette. An appropriate recombinase is provided, and the transfer cassette is integrated at the target site. The polynucleotide of interest is thereby integrated at a specific chromosomal position in the plant genome.

[0113] In an aspect, the disclosed methods can be used to introduce into vegetative plant organs and their composite tissues including but are not limited to leaf explants, leaf primordia, stipule, cotyledons, cotyledonary nodes, mesocotyl, stem explants, primary roots, lateral secondary roots, root segments, buds, and meristems, including but not limited to apical meristems, root meristems, secondary meristems, axillary meristems, and floral meristems, with increased efficiency and speed polynucleotides useful to target a specific site for modification in the genome of a plant. Site specific modifications that can be introduced with the disclosed methods include those produced using any method for introducing site specific modification, including, but not limited to, through the use of gene repair oligonucleotides (e.g. US Publication 2013/0019349), or through the use of double-stranded break technologies such as TALENs, meganucleases, zinc finger nucleases, CRISPR-Cas, and the like. For example, the disclosed methods can be used to introduce a CRISPR-Cas system into a plant cell or plant, for the purpose of genome modification of a target sequence in the genome of a plant or plant cell, for selecting plants, for deleting a base or a sequence, for gene editing, and for inserting a polynucleotide of interest into the genome of a plant or plant cell. Thus, the disclosed methods can be used together with a CRISPR-Cas system to provide for an effective system for modifying or altering target sites and nucleotides of interest within the genome of a plant, plant cell or seed. The Cas endonuclease gene is a plant optimized Cas9 endonuclease, wherein the plant optimized Cas9 endonuclease is capable of binding to and creating a double strand break in a genomic target sequence the plant genome.

[0114] The Cas endonuclease is guided by the guide nucleotide to recognize and optionally introduce a double strand break at a specific target site into the genome of a cell. The CRISPR-Cas system provides for an effective system for modifying target sites within the genome of a plant, plant cell or seed. Further provided are methods and compositions employing a guide polynucleotide/Cas endonuclease system to provide an effective system for modifying target sites within the genome of a cell and for editing a nucleotide sequence in the genome of a cell. Once a genomic target site is identified, a variety of methods can be employed to further modify the target sites such that they contain a variety of polynucleotides of interest. The disclosed compositions and methods can be used to introduce a CRISPR-Cas system for editing a nucleotide sequence in the genome of a cell. The nucleotide sequence to be edited (the nucleotide sequence of interest) can be located within or outside a target site that is recognized by a Cas endonuclease.

[0115] CRISPR loci (Clustered Regularly Interspaced Short Palindromic Repeats) (also known as SPIDRs-SPacer Interspersed Direct Repeats) constitute a family of recently described DNA loci. CRISPR loci consist of short and highly conserved DNA repeats (typically 24 to 40 bp, repeated from 1 to 140 times—also referred to as CRISPR-repeats) which are partially palindromic. The repeated sequences (usually specific to a species) are interspaced by variable sequences of constant length (typically 20 to 58 by depending on the CRISPR locus (WO2007/025097 published Mar. 1, 2007).

[0116] Cas gene includes a gene that is generally coupled, associated or close to or in the vicinity of flanking CRISPR loci. The terms “Cas gene” and “CRISPR-associated (Cas) gene” are used interchangeably herein.

[0117] In another aspect, the Cas endonuclease gene is operably linked to a SV40 nuclear targeting signal upstream of the Cas codon region and a bipartite VirD2 nuclear localization signal (Tinland et al. (1992) Proc. Natl. Acad. Sci. USA 89:7442-6) downstream of the Cas codon region.

[0118] As related to the Cas endonuclease, the terms “functional fragment,” “fragment that is functionally equivalent,” and “functionally equivalent fragment” are used interchangeably herein. These terms refer to a portion or subsequence of the Cas endonuclease sequence in which the ability to create a double-strand break is retained.

[0119] As related to the Cas endonuclease, the terms “functional variant,” “variant that is functionally equivalent” and “functionally equivalent variant” are used interchangeably herein. These terms refer to a variant of the Cas endonuclease in which the ability to create a double-strand break is retained. Fragments and variants can be obtained via methods such as site-directed mutagenesis and synthetic construction.

[0120] In an aspect, the Cas endonuclease gene is a plant codon optimized Streptococcus pyogenes Cas9 gene that can recognize any genomic sequence of the form N(12-30)NGG which can in principle be targeted.

[0121] Endonucleases are enzymes that cleave the phosphodiester bond within a polynucleotide chain and include restriction endonucleases that cleave DNA at specific sites without damaging the bases. Restriction endonucleases include Type I, Type II, Type III, and Type IV endonucleases, which further include subtypes. In the Type I and Type III systems, both the methylase and restriction activities are contained in a single complex. Endonucleases also include meganucleases, also known as homing endonucleases (HEases), which like restriction endonucleases, bind and cut at a specific recognition site, however the recognition sites for meganucleases are typically longer, about 18 bp or more (Patent application PCT/US 12/30061 filed on Mar. 22, 2012). Meganucleases have been classified into four families based on conserved sequence motifs. These motifs participate in the coordination of metal ions and hydrolysis of phosphodiester bonds. Meganucleases are notable for their long recognition sites, and for tolerating some sequence polymorphisms in their DNA substrates. The naming convention for meganuclease is similar to the convention for other restriction endonuclease. Meganucleases are also characterized by prefix F-, I-, or PI- for enzymes encoded by free-standing ORFs, introns, and inteins, respectively. One step in the recombination process involves polynucleotide cleavage at or near the recognition site. This cleaving activity can be used to produce a double-strand break. For reviews of site-specific recombinases and their recognition sites, see, Sauer (1994) Curr Op Biotechnol 5:521-7; and Sadowski (1993) FASEB 7:760-7. In some examples the recombinase is from the Integrase or Resolvase families. TAL effector nucleases are a new class of sequence-specific nucleases that can be used to make double-strand breaks at specific target sequences in the genome of a plant or other organism. (Miller, et al. (2011) Nature Biotechnology 29:143-148). Zinc finger nucleases (ZFNs) are engineered double-strand break inducing agents comprised of a zinc finger DNA binding domain and a double-strand-break-inducing agent domain. Recognition site specificity is conferred by the zinc finger domain, which typically comprising two, three, or four zinc fingers, for example having a C2H2 structure, however other zinc finger structures are known and have been engineered. Zinc finger domains are amenable for designing polypeptides which specifically bind a selected polynucleotide recognition sequence. ZFNs include an engineered DNA-binding zinc finger domain linked to a nonspecific endonuclease domain, for example nuclease domain from a Type Ms endonuclease such as Fokl. Additional functionalities can be fused to the zinc-finger binding domain, including transcriptional activator domains, transcription repressor domains, and methylases. In some examples, dimerization of nuclease domain is required for cleavage activity. Each zinc finger recognizes three consecutive base pairs in the target DNA. For example, a 3-finger domain recognized a sequence of 9 contiguous nucleotides, with a dimerization requirement of the nuclease, two sets of zinc finger triplets are used to bind an 18-nucleotide recognition sequence.

[0122] A “Dead-CAS9” (dCAS9) as used herein, is used to supply a transcriptional repressor domain. The dCAS9 has been mutated so that can no longer cut DNA. The dCASO can still bind when guided to a sequence by the gRNA and can also be fused to repressor elements. The dCAS9 fused to the repressor element, as described herein, is abbreviated to dCAS9˜REP, where the repressor element (REP) can be any of the known repressor motifs that have been characterized in plants. An expressed guide RNA (gRNA) binds to the dCAS9˜REP protein and targets the binding of the dCAS9-REP fusion protein to a specific predetermined nucleotide sequence within a promoter (a promoter within the T-DNA). For example, if this is expressed beyond—the border using a ZM-UBI PRO::dCAS9˜REP::PINII TERM cassette along with a U6-POL PRO::gRNA::U6 TERM cassette and the gRNA is designed to guide the dCAS9-REP protein to bind the SB-UBI promoter in the expression cassette SB-UBI PRO::moPAT::PINII TERM within the T-DNA, any event that has integrated the beyond-the-border sequence would be bialaphos sensitive. Transgenic events that integrate only the T-DNA would express moPAT and be bialaphos resistant. The advantage of using a dCAS9 protein fused to a repressor (as opposed to a TETR or ESR) is the ability to target these repressors to any promoter within the T-DNA. TETR and ESR are restricted to cognate operator binding sequences. Alternatively, a synthetic Zinc-Finger Nuclease fused to a repressor domain can be used in place of the gRNA and dCAS9˜REP (Urritia et al., 2003, Genome Biol. 4:231) as described above.

[0123] The type II CRISPR/Cas system from bacteria employs a crRNA and tracrRNA to guide the Cas endonuclease to its DNA target. The crRNA (CRISPR RNA) contains the region complementary to one strand of the double strand DNA target and base pairs with the tracrRNA (trans-activating CRISPR RNA) forming a RNA duplex that directs the Cas endonuclease to cleave the DNA target. As used herein, the term “guide nucleotide” relates to a synthetic fusion of two RNA molecules, a crRNA (CRISPR RNA) comprising a variable targeting domain, and a tracrRNA. In an aspect, the guide nucleotide comprises a variable targeting domain of 12 to 30 nucleotide sequences and a RNA fragment that can interact with a Cas endonuclease.

[0124] As used herein, the term “guide polynucleotide” relates to a polynucleotide sequence that can form a complex with a Cas endonuclease and enables the Cas endonuclease to recognize and optionally cleave a DNA target site. The guide polynucleotide can be a single molecule or a double molecule. The guide polynucleotide sequence can be a RNA sequence, a DNA sequence, or a combination thereof (a RNA-DNA combination sequence). Optionally, the guide polynucleotide can comprise at least one nucleotide, phosphodiester bond or linkage modification such as, but not limited, to Locked Nucleic Acid (LNA), 5-methyl dC, 2,6-Diaminopurine, 2′-Fluoro A, 2′-Fluoro U, 2′-O-Methyl RNA, phosphorothioate bond, linkage to a cholesterol molecule, linkage to a polyethylene glycol molecule, linkage to a spacer 18 (hexaethylene glycol chain) molecule, or 5′ to 3′ covalent linkage resulting in circularization. A guide polynucleotide that solely comprises ribonucleic acids is also referred to as a “guide nucleotide”.

[0125] Nucleotide sequence modification of the guide polynucleotide, VT domain and/or CER domain can be selected from, but not limited to, the group consisting of a 5′ cap, a 3′ polyadenylated tail, a riboswitch sequence, a stability control sequence, a sequence that forms a dsRNA duplex, a modification or sequence that targets the guide poly nucleotide to a subcellular location, a modification or sequence that provides for tracking, a modification or sequence that provides a binding site for proteins, a Locked Nucleic Acid (LNA), a 5-methyl dC nucleotide, a 2,6-Diaminopurine nucleotide, a 2′-Fluoro A nucleotide, a 2′-Fluoro U nucleotide; a 2′-O-Methyl RNA nucleotide, a phosphorothioate bond, linkage to a cholesterol molecule, linkage to a polyethylene glycol molecule, linkage to a spacer 18 molecule, a 5′ to 3′ covalent linkage, or any combination thereof. These modifications can result in at least one additional beneficial feature, wherein the additional beneficial feature is selected from the group of a modified or regulated stability, a subcellular targeting, tracking, a fluorescent label, a binding site for a protein or protein complex, modified binding affinity to complementary target sequence, modified resistance to cellular degradation, and increased cellular permeability.

[0126] In an aspect, the guide nucleotide and Cas endonuclease are capable of forming a complex that enables the Cas endonuclease to introduce a double strand break at a DNA target site.

[0127] In an aspect of the methods of the disclosure the variable target domain is 12, 13, 14, 15, 16, 17, 18, 19, 20, 21, 22, 23, 24, 25, 26, 27, 28, 29 or 30 nucleotides in length.

[0128] In an aspect of the methods of the disclosure, the guide nucleotide comprises a cRNA (or cRNA fragment) and a tracrRNA (or tracrRNA fragment) of the type II CRISPR/Cas system that can form a complex with a type II Cas endonuclease, wherein the guide nucleotide Cas endonuclease complex can direct the Cas endonuclease to a plant genomic target site, enabling the Cas endonuclease to introduce a double strand break into the genomic target site. The guide nucleotide can be introduced into a plant or plant cell directly using any method known in the art such as, but not limited to, particle bombardment or topical applications.

[0129] In an aspect, the guide nucleotide can be introduced indirectly by introducing a recombinant DNA molecule comprising the corresponding guide DNA sequence operably linked to a plant specific promoter that is capable of transcribing the guide nucleotide in the plant cell. The term “corresponding guide DNA” includes a DNA molecule that is identical to the RNA molecule but has a “T” substituted for each “U” of the RNA molecule.

[0130] In an aspect, the guide nucleotide is introduced via particle bombardment or using the disclosed methods and compositions for Agrobacterium transformation of a recombinant DNA construct comprising the corresponding guide DNA operably linked to a plant U6 polymerase III promoter.

[0131] In an aspect, the RNA that guides the RNA Cas9 endonuclease complex, is a duplexed RNA comprising a duplex crRNA-tracrRNA. One advantage of using a guide nucleotide versus a duplexed crRNA-tracrRNA is that only one expression cassette needs to be made to express the fused guide nucleotide.

[0132] The terms “target site,” “target sequence,” “target DNA,” “target locus,” “genomic target site,” “genomic target sequence,” and “genomic target locus” are used interchangeably herein and refer to a polynucleotide sequence in the genome (including choloroplastic and mitochondrial DNA) of a plant cell at which a double-strand break is induced in the plant cell genome by a Cas endonuclease. The target site can be an endogenous site in the plant genome, or alternatively, the target site can be heterologous to the plant and thereby not be naturally occurring in the genome, or the target site can be found in a heterologous genomic location compared to where it occurs in nature.

[0133] As used herein, terms “endogenous target sequence” and “native target sequence” are used interchangeably herein to refer to a target sequence that is endogenous or native to the genome of a plant and is at the endogenous or native position of that target sequence in the genome of the plant. In an aspect, the target site can be similar to a DNA recognition site or target site that is specifically recognized and/or bound by a double-strand break inducing agent such as a LIG3-4 endonuclease (US patent publication 2009/0133152 A1 (published May 21, 2009) or a MS26++ meganuclease (U.S. patent application Ser. No. 13/526,912 filed Jun. 19, 2012).

[0134] An “artificial target site” or “artificial target sequence” are used interchangeably herein and refer to a target sequence that has been introduced into the genome of a plant. Such an artificial target sequence can be identical in sequence to an endogenous or native target sequence in the genome of a plant but be located in a different position (i.e., a non-endogenous or non-native position) in the genome of a plant.

[0135] An “altered target site,” “altered target sequence” “modified target site,” and “modified target sequence” are used interchangeably herein and refer to a target sequence as disclosed herein that comprises at least one alteration when compared to non-altered target sequence. Such “alterations” include, for example: (i) replacement of at least one nucleotide, (ii) a deletion of at least one nucleotide, (iii) an insertion of at least one nucleotide, or (iv) any combination of (i)-(iii).

[0136] In an aspect, the disclosed methods can be used to introduce into plants polynucleotides useful for gene suppression of a target gene in a plant. Reduction of the activity of specific genes (also known as gene silencing, or gene suppression) is desirable for several aspects of genetic engineering in plants. Many techniques for gene silencing are well known to one of skill in the art, including but not limited to antisense technology.

[0137] In an aspect, the disclosed methods can be used to introduce into plants polynucleotides useful for the targeted integration of nucleotide sequences into a plant. For example, the disclosed methods can be used to introduce T-DNA expression cassettes comprising nucleotide sequences of interest flanked by non-identical recombination sites are used to transform a plant comprising a target site. In an aspect, the target site contains at least a set of non-identical recombination sites corresponding to those on the T-DNA expression cassette. The exchange of the nucleotide sequences flanked by the recombination sites is affected by a recombinase. Thus, the disclosed methods can be used for the introduction of T-DNA expression cassettes for targeted integration of nucleotide sequences, wherein the T-DNA expression cassettes which are flanked by non-identical recombination sites recognized by a recombinase that recognizes and implements recombination at the nonidentical recombination sites. Accordingly, the disclosed methods and composition can be used to improve efficiency and speed of development of plants containing non-identical recombination sites.

[0138] Thus, the disclosed methods can further comprise methods for the directional, targeted integration of exogenous nucleotides into a transformed plant. In an aspect, the disclosed methods use novel recombination sites in a gene targeting system which facilitates directional targeting of desired genes and nucleotide sequences into corresponding recombination sites previously introduced into the target plant genome.

[0139] In an aspect, a nucleotide sequence flanked by two non-identical recombination sites is introduced into one or more cells of an explant derived from the target organism's genome establishing a target site for insertion of nucleotide sequences of interest. Once a stable plant or cultured tissue is established a second construct, or nucleotide sequence of interest, flanked by corresponding recombination sites as those flanking the target site, is introduced into the stably transformed plant or tissues in the presence of a recombinase protein. This process results in exchange of the nucleotide sequences between the non-identical recombination sites of the target site and the T-DNA expression cassette.

[0140] It is recognized that the transformed plant prepared in this manner may comprise multiple target sites; i. e., sets of non-identical recombination sites. In this manner, multiple manipulations of the target site in the transformed plant are available. By target site in the transformed plant is intended a DNA sequence that has been inserted into the transformed plant's genome and comprises non-identical recombination sites.

[0141] Examples of recombination sites for use in the disclosed method are known. The two-micron plasmid found in most naturally occurring strains of Saccharomyces cerevisiae, encodes a site-specific recombinase that promotes an inversion of the DNA between two inverted repeats. This inversion plays a central role in plasmid copy-number amplification.

[0142] The protein, designated FLP protein, catalyzes site-specific recombination events. The minimal recombination site (FRT) has been defined and contains two inverted 13-base pair (bp) repeats surrounding an asymmetric 8-bp spacer. The FLP protein cleaves the site at the junctions of the repeats and the spacer and is covalently linked to the DNA via a 3′phosphate. Site specific recombinases like FLP cleave and religate DNA at specific target sequences, resulting in a precisely defined recombination between two identical sites. To function, the system needs the recombination sites and the recombinase. No auxiliary factors are needed. Thus, the entire system can be inserted into and function in plant cells. The yeast FLP\FRT site specific recombination system has been shown to function in plants. To date, the system has been utilized for excision of unwanted DNA. See, Lyznik et at. (1993) Nucleic Acid Res. 21: 969-975. In contrast, the present disclosure utilizes non-identical FRTs for the exchange, targeting, arrangement, insertion and control of expression of nucleotide sequences in the plant genome.

[0143] In an aspect, a transformed organism of interest, such as an explant from a plant, containing a target site integrated into its genome is needed. The target site is characterized by being flanked by non-identical recombination sites. A targeting cassette is additionally required containing a nucleotide sequence flanked by corresponding non-identical recombination sites as those sites contained in the target site of the transformed organism. A recombinase which recognizes the non-identical recombination sites and catalyzes site-specific recombination is required.

[0144] It is recognized that the recombinase can be provided by any means known in the art. That is, it can be provided in the organism or plant cell by transforming the organism with an expression cassette capable of expressing the recombinase in the organism, by transient expression, or by providing messenger RNA (mRNA) for the recombinase or the recombinase protein.

[0145] By “non-identical recombination sites” it is intended that the flanking recombination sites are not identical in sequence and will not recombine or recombination between the sites will be minimal. That is, one flanking recombination site may be a FRT site where the second recombination site may be a mutated FRT site. The non-identical recombination sites used in the methods of the present disclosure prevent or greatly suppress recombination between the two flanking recombination sites and excision of the nucleotide sequence contained therein. Accordingly, it is recognized that any suitable non-identical recombination sites may be utilized in the present disclosure, including FRT and mutant FRT sites, FRT and lox sites, lox and mutant lox sites, as well as other recombination sites known in the art.

[0146] By suitable non-identical recombination site implies that in the presence of active recombinase, excision of sequences between two non-identical recombination sites occurs, if at all, with an efficiency considerably lower than the recombinationally-mediated exchange targeting arrangement of nucleotide sequences into the plant genome. Thus, suitable non-identical sites for use in the present disclosure include those sites where the efficiency of recombination between the sites is low; for example, where the efficiency is less than about 30 to about 50%, preferably less than about 10 to about 30%, more preferably less than about 5 to about 10%.

[0147] As noted above, the recombination sites in the targeting cassette correspond to those in the target site of the transformed plant. That is, if the target site of the transformed plant contains flanking non-identical recombination sites of FRT and a mutant FRT, the targeting cassette will contain the same FRT and mutant FRT non-identical recombination sites.

[0148] It is furthermore recognized that the recombinase, which is used in the disclosed methods, will depend upon the recombination sites in the target site of the transformed plant and the targeting cassette. That is, if FRT sites are utilized, the FLP recombinase will be needed. In the same manner, where lox sites are utilized, the Cre recombinase is required. If the non-identical recombination sites comprise both a FRT and a lox site, both the FLP and Cre recombinase will be required in the plant cell.

[0149] The FLP recombinase is a protein which catalyzes a site-specific reaction that is involved in amplifying the copy number of the two-micron plasmid of S. cerevisiae during DNA replication. FLP protein has been cloned and expressed. See, for example, Cox (1993) Proc. Natl. Acad. Sci. U.S.A 80: 4223-4227. The FLP recombinase for use in the present disclosure may be that derived from the genus Saccharomyces. It may be preferable to synthesize the recombinase using plant preferred codons for optimum expression in a plant of interest. See, for example, U.S. application Ser. No. 08/972,258 filed Nov. 18, 1997, entitled “Novel Nucleic Acid Sequence Encoding FLP Recombinase,” herein incorporated by reference.

[0150] The bacteriophage recombinase Cre catalyzes site-specific recombination between two lox sites. The Cre recombinase is known in the art. See, for example, Guo et al. (1997) Nature 389: 40-46; Abremski et al. (1984) J. Biol. Chem. 259: 1509-1514; Chen et al. (1996) Somat. Cell Mol. Genet. 22: 477-488; and Shaikh et al. (1977) J. Biol. Chem. 272: 5695-5702. All of which are herein incorporated by reference. Such Cre sequence may also be synthesized using plant preferred codons.

[0151] Where appropriate, the nucleotide sequences to be inserted in the plant genome may be optimized for increased expression in the transformed plant. Where mammalian, yeast, or bacterial genes are used in the present disclosure, they can be synthesized using plant preferred codons for improved expression. It is recognized that for expression in monocots, dicot genes can also be synthesized using monocot preferred codons. Methods are available in the art for synthesizing plant preferred genes. See, for example, U. S. Pat. Nos. 5,380,831, 5,436,391, and Murray et al. (1989) Nucleic Acids Res. 17: 477-498, herein incorporated by reference. The plant preferred codons may be determined from the codons utilized more frequently in the proteins expressed in the plant of interest. It is recognized that monocot or dicot preferred sequences may be constructed as well as plant preferred sequences for particular plant species. See, for example, EPA 0359472; EPA 0385962; WO 91/16432; Perlak et al. (1991) Proc. Natl. Acad. Sci. USA, 88: 3324-3328; and Murray et al. (1989) Nucleic Acids Research, 17: 477-498. U.S. Pat. Nos. 5,380,831; 5,436,391; and the like, herein incorporated by reference. It is further recognized that all or any part of the gene sequence may be optimized or synthetic. That is, fully optimized or partially optimized sequences may also be used.

[0152] Additional sequence modifications are known to enhance gene expression in a cellular host and can be used in the present disclosure. These include elimination of sequences encoding spurious polyadenylation signals, exon-intron splice site signals, transposon-like repeats, and other such well-characterized sequences, which may be deleterious to gene expression. The G-C content of the sequence may be adjusted to levels average for a given cellular host, as calculated by reference to known genes expressed in the host cell. When possible, the sequence is modified to avoid predicted hairpin secondary RNA structures.

[0153] The present disclosure also encompasses novel FLP recombination target sites (FRT). The FRT has been identified as a minimal sequence comprising two 13 base pair repeats, separated by an eight (8) base spacer. The nucleotides in the spacer region can be replaced with a combination of nucleotides, so long as the two 13-base repeats are separated by eight nucleotides. It appears that the actual nucleotide sequence of the spacer is not critical; however, for the practice of the present disclosure, some substitutions of nucleotides in the space region may work better than others. The eight-base pair spacer is involved in DNA-DNA pairing during strand exchange. The asymmetry of the region determines the direction of site alignment in the recombination event, which will subsequently lead to either inversion or excision. As indicated above, most of the spacer can be mutated without a loss of function. See, for example, Schlake and Bode (1994) Biochemistry 33: 12746-12751, herein incorporated by reference.

[0154] Novel FRT mutant sites can be used in the practice of the disclosed methods. Such mutant sites may be constructed by PCR-based mutagenesis. Although mutant FRT sites are known (see SEQ ID Nos 2, 3, 4 and 5 of WO1999/025821), it is recognized that other mutant FRT sites may be used in the practice of the present disclosure. The present disclosure is not restricted to the use of a particular FRT or recombination site, but rather that non-identical recombination sites or FRT sites can be utilized for targeted insertion and expression of nucleotide sequences in a plant genome. Thus, other mutant FRT sites can be constructed and utilized based upon the present disclosure.

[0155] As discussed above, bringing genomic DNA containing a target site with non-identical recombination sites together with a vector containing a T-DNA expression cassette with corresponding non-identical recombination sites, in the presence of the recombinase, results in recombination. The nucleotide sequence of the T-DNA expression cassette located between the flanking recombination sites is exchanged with the nucleotide sequence of the target site located between the flanking recombination sites. In this manner, nucleotide sequences of interest may be precisely incorporated into the genome of the host.

[0156] It is recognized that many variations of the present disclosure can be practiced. For example, target sites can be constructed having multiple non-identical recombination sites. Thus, multiple genes or nucleotide sequences can be stacked or ordered at precise locations in the plant genome. Likewise, once a target site has been established within the genome, additional recombination sites may be introduced by incorporating such sites within the nucleotide sequence of the T-DNA expression cassette and the transfer of the sites to the target sequence. Thus, once a target site has been established, it is possible to subsequently add sites, or alter sites through recombination.

[0157] Another variation includes providing a promoter or transcription initiation region operably linked with the target site in an organism. Preferably, the promoter will be 5′ to the first recombination site. By transforming the organism with a T-DNA expression cassette comprising a coding region, expression of the coding region will occur upon integration of the T-DNA expression cassette into the target site. This aspect provides for a method to select transformed cells, particularly plant cells, by providing a selectable marker sequence as the coding sequence.

[0158] Other advantages of the present system include the ability to reduce the complexity of integration of transgenes or transferred DNA in an organism by utilizing T-DNA expression cassettes as discussed above and selecting organisms with simple integration patterns. In the same manner, preferred sites within the genome can be identified by comparing several transformation events. A preferred site within the genome includes one that does not disrupt expression of essential sequences and provides for adequate expression of the transgene sequence.

[0159] The disclosed methods also provide for means to combine multiple expression cassettes at one location within the genome. Recombination sites may be added or deleted at target sites within the genome.

[0160] Any means known in the art for bringing the three components of the system together may be used in the present disclosure. For example, a plant can be stably transformed to harbor the target site in its genome. The recombinase may be transiently expressed or provided. Alternatively, a nucleotide sequence capable of expressing the recombinase may be stably integrated into the genome of the plant. In the presence of the corresponding target site and the recombinase, the T-DNA expression cassette, flanked by corresponding non-identical recombination sites, is inserted into the transformed plant's genome.

[0161] Alternatively, the components of the system may be brought together by sexually crossing transformed plants. In this aspect, a transformed plant, parent one, containing a target site integrated in its genome can be sexually crossed with a second plant, parent two, that has been genetically transformed with a T-DNA expression cassette containing flanking non-identical recombination sites, which correspond to those in plant one. Either plant one or plant two contains within its genome a nucleotide sequence expressing recombinase. The recombinase may be under the control of a constitutive or inducible promoter. In this manner, expression of recombinase and subsequent activity at the recombination sites can be controlled.

[0162] The disclosed methods are useful in targeting the integration of transferred nucleotide sequences to a specific chromosomal site. The nucleotide sequence may encode any nucleotide sequence of interest. Particular genes of interest include those which provide a readily analyzable functional feature to the host cell and/or organism, such as marker genes, as well as other genes that alter the phenotype of the recipient cells, and the like. Thus, genes effecting plant growth, height, susceptibility to disease, insects, nutritional value, and the like may be utilized in the present disclosure. The nucleotide sequence also may encode an ‘antisense’ sequence to turn off or modify gene expression.

[0163] It is recognized that the nucleotide sequences will be utilized in a functional expression unit or T-DNA expression cassette. By functional expression unit or T-DNA expression cassette is intended, the nucleotide sequence of interest with a functional promoter, and in most instances a termination region. There are various ways to achieve the functional expression unit within the practice of the present disclosure. In one aspect of the present disclosure, the nucleic acid of interest is transferred or inserted into the genome as a functional expression unit.

[0164] Alternatively, the nucleotide sequence may be inserted into a site within the genome which is 3′ to a promoter region. In this latter instance, the insertion of the coding sequence 3′ to the promoter region is such that a functional expression unit is achieved upon integration. The T-DNA expression cassette will comprise a transcriptional initiation region, or promoter, operably linked to the nucleic acid encoding the peptide of interest. Such an expression cassette is provided with a plurality of restriction sites for insertion of the gene or genes of interest to be under the transcriptional regulation of the regulatory regions.

[0165] A summary of SEQ ID NOS: 1-198 useful in the methods of the disclosure is presented in Table 3.

TABLE 3
Summary of SEQ ID NOS: 1-198.

| | Polynucleotide | | |
|---|---|---|---|
| SEQ | (DNA) or | | |
| ID | Polypeptide | | |
| NO. | (PRT) | Name | Description |
| 1 | DNA | GM-HBSTART3 | Glycine max HBSTART3 |
| | | | (Homeodomain StAR-related lipid |
| | | | transfer3) promoter sequence |
| 2 | DNA | GM-HBSTART3 | Glycine max HBSTART3 |
| | | (TRUNCATED) | (Homeodomain StAR-related lipid |
| | | | transfer3) promoter sequence |
| | | | (TRUNCATED) |
| 3 | DNA | AT-ML1 | Arabidopsis thaliana ML1 (MERISTEM |
| | | | LAYER1) promoter sequence |
| 4 | DNA | GM-ML1-Like | Glycine max ML1-Like (MERISTEM |
| | | | LAYER1-Like) promoter sequence |
| 5 | DNA | GM-ML1-Like | Glycine max ML1-Like (MERISTEM |
| | | (TRUNCATED) | LAYER1-Like) promoter sequence |
| | | | (TRUNCATED) |
| 6 | DNA | ZM-HBSTART3 | Zea mays HB START3 (Homeodomain |
| | | | StAR-related lipid transfer3) promoter |
| | | | sequence |
| 7 | DNA | OS-HBSTART3 | Oryza sativa HB START3 |
| | | | (Homeodomain StAR-related lipid |
| | | | transfer3) promoter sequence |
| 8 | DNA | AT-PDF1 | Arabidopsis thaliana PDF1 |
| | | | (PROTODERMAL FACTOR1) |
| | | | promoter sequence |
| 9 | DNA | GM-PDF1 | Glycine max PDF1 (PROTODERMAL |
| | | | FACTOR1) promoter sequence |
| 10 | DNA | GM-PDF1 | Glycine max PDF1 (PROTODERMAL |
| | | (TRUNCATED) | FACTOR1) promoter sequence |
| | | | (TRUNCATED) |
| 11 | DNA | SB-PDF1 | Sorghum bicolor PDF1 |
| | | | (PROTODERMAL FACTOR1) |
| | | | promoter sequence |
| 12 | DNA | OS-PDF1 | Oryza sativa PDF1 (PROTODERMAL |
| | | | FACTOR1) promoter sequence |
| 13 | DNA | OS-PDF1 | Oryza sativa PDF1 (PROTODERMAL |
| | | (TRUNCATED) | FACTOR1) promoter sequence |
| | | | (TRUNCATED) |
| 14 | DNA | PT-PDF 1 | Populus trichocarpa PDF1 |
| | | | (PROTODERMAL FACTOR1) |
| | | | promoter sequence |
| 15 | DNA | PT-PDF 1 | Populus trichocarpa PDF1 |
| | | (TRUNCATED) | (PROTODERMAL FACTOR1) |
| | | | promoter sequence (TRUNCATED) |
| 16 | DNA | SI-PDF 1 | Setaria italica PDF1 (PROTODERMAL |
| | | | FACTOR1) promoter sequence |
| 17 | DNA | SI-PDF 1 | Setaria italica PDF1 (PROTODERMAL |
| | | (TRUNCATED) | FACTOR1) promoter sequence |
| | | | (TRUNCATED) |
| 18 | DNA | AT-PDF2 | Arabidopsis thaliana PDF2 |
| | | | (PROTODERMAL FACTOR2) |
| | | | promoter sequence |
| 19 | DNA | GM-PDF2 | Glycine max PDF2 (PROTODERMAL |
| | | | FACTOR2) promoter sequence |
| 20 | DNA | GM-PDF2 | Glycine max PDF2 (PROTODERMAL |
| | | (TRUNCATED) | FACTOR2) promoter sequence |
| | | | (TRUNCATED) |
| 21 | DNA | ZM-GL1 | Zea mays GL1 (GLABROUS1) promoter |
| | | | sequence |
| 22 | DNA | AT-PDF2a | Arabidopsis thaliana PDF2a |
| | | | (PROTODERMAL FACTOR2a) |
| | | | promoter sequence |
| 23 | DNA | AT-PDF2a | Arabidopsis thaliana PDF2a |
| | | (TRUNCATED) | (PROTODERMAL FACTOR2a) |
| | | | promoter sequence (TRUNCATED) |
| 24 | DNA | GM-PDF2a | Glycine max PDF2a (PROTODERMAL |
| | | | FACTOR2a) promoter sequence |
| 25 | DNA | GM-PDF2a | Glycine max PDF2a (PROTODERMAL |
| | | (TRUNCATED) | FACTOR2a) promoter sequence |
| | | | (TRUNCATED) |
| 26 | DNA | OS-PDF2 | Oryza sativa PDF2 (PROTODERMAL |
| | | | FACTOR2) promoter sequence |
| 27 | DNA | OS-PDF2 | Oryza sativa PDF2 (PROTODERMAL |
| | | (TRUNCATED) | FACTOR2) promoter sequence |
| | | | (TRUNCATED) |
| 28 | DNA | PT-PDF2 | Populus trichocarpa PDF2 |
| | | | (PROTODERMAL FACTOR2) |
| | | | promoter sequence) |
| 29 | DNA | PT-PDF2 | Populus trichocarpa PDF2 |
| | | (TRUNCATED) | (PROTODERMAL FACTOR2) |
| | | | promoter sequence (TRUNCATED) |
| 30 | DNA | VV-PDF2 | Vitis vinifera PDF2 (PROTODERMAL |
| | | | FACTOR2) promoter sequence |
| 31 | DNA | VV-PDF2 | Vitis vinifera PDF2 (PROTODERMAL |
| | | (TRUNCATED) | FACTOR2) promoter sequence |
| | | | (TRUNCATED) |
| 32 | DNA | ZM-PDF2 | Zea mays PDF2 (PROTODERMAL |
| | | | FACTOR2) promoter sequence |
| 33 | DNA | SI-PDF2 | Setaria italica PDF2 (PROTODERMAL |
| | | | FACTOR2) promoter sequence |
| 34 | DNA | SI-PDF2 | Setaria italica PDF2 (PROTODERMAL |
| | | (TRUNCATED) | FACTOR2) promoter |
| | | | sequence(TRUNCATED) |
| 35 | DNA | VV-PDF2a | Vitis vinifera PDF2a (PROTODERMAL |
| | | | FACTOR2a) promoter sequence |
| 36 | DNA | PT-PDF2a | Populus trichocarpa PDF2a |
| | | | (PROTODERMAL FACTOR2a) |
| | | | promoter sequence |
| 37 | DNA | PT-PDF2a | Populus trichocarpa PDF2a |
| | | (TRUNCATED) | (PROTODERMAL FACTOR2a) |
| | | | promoter sequence (TRUNCATED) |
| 38 | DNA | MT-PDF2 | Medicago truncatula PDF2 |
| | | | (PROTODERMAL FACTOR2) |
| | | | promoter sequence |
| 39 | DNA | MT-PDF2 | Medicago truncatula PDF2 |
| | | (TRUNCATED) | (PROTODERMAL FACTOR2) |
| | | | promoter sequence (TRUNCATED) |
| 40 | DNA | AT-HDG2 | Arabidopsis thaliana HDG2 |
| | | | (HOMEODOMAIN GLABROUS2) |
| | | | promoter sequence |
| 41 | DNA | GM-HDG2 | Glycine max HDG2 (HOMEODOMAIN |
| | | | GLABROUS2) promoter sequence |
| 42 | DNA | GM-HDG2 | Glycine max HDG2 (HOMEODOMAIN |
| | | (TRUNCATED) | GLABROUS2) promoter sequence |
| | | | (TRUNCATED) |
| 43 | DNA | SB-HDG2 | Sorghum bicolor HDG2 |
| | | | (HOMEODOMAIN GLABROUS2) |
| | | | promoter sequence |
| 44 | DNA | SB-HDG2 | Sorghum bicolor HDG2 |
| | | (TRUNCATED) | (HOMEODOMAIN GLABROUS2) |
| | | | promoter sequence (TRUNCATED) |
| 45 | DNA | AT-CER6 | Arabidopsis thaliana CER6 |
| | | | (ECERIFERUM6) promoter sequence |
| 46 | DNA | AT-CER60 | Arabidopsis thaliana CER60 |
| | | | (ECERIFERUM60) promoter sequence |
| 47 | DNA | AT-CER60 | Arabidopsis thaliana CER60 |
| | | (TRUNCATED) | (ECERIFERUM60) promoter sequence |
| | | | (TRUNCATED) |
| 48 | DNA | GM-CER6 | Glycine max CER6 (ECERIFERUM6) |
| | | | promoter sequence |
| 49 | DNA | GM-CER6 | Glycine max CER6 (ECERIFERUM6) |
| | | (TRUNCATED) | promoter sequence (TRUNCATED) |
| 50 | DNA | PT-CER6 | Populus trichocarpa CER6 |
| | | | (ECERIFERUM6) promoter sequence |
| 51 | DNA | PT-CER6 | Populus trichocarpa CER6 |
| | | (TRUNCATED) | (ECERIFERUM6) promoter sequence |
| | | | (TRUNCATED) |
| 52 | DNA | VV-CER6 | Vitis vinifera CER6 (ECERIFERUM6) |
| | | | promoter sequence |
| 53 | DNA | VV-CER6 | Vitis vinifera CER6 (ECERIFERUM6) |
| | | (TRUNCATED) | promoter sequence (TRUNCATED) |
| 54 | DNA | SB-CER6 | Sorghum bicolor CER6 |
| | | | (ECERIFERUM6) promoter sequence |
| 55 | DNA | ZM-CER6 | Zea mays CER6 (ECERIFERUM6) |
| | | | promoter sequence |
| 56 | DNA | SI-CER6 | Setaria italica CER6 (ECERIFERUM6) |
| | | | promoter sequence |
| 57 | DNA | SI-CER6 | Setaria italica CER6 (ECERIFERUM6) |
| | | (TRUNCATED) | promoter sequence (TRUNCATED) |
| 58 | DNA | OS-CER6 | Oryza sativa CER6 (ECERIFERUM6) |
| | | | promoter sequence |
| 59 | DNA | OS-CER6 | Oryza sativa CER6 (ECERIFERUM6) |
| | | (TRUNCATED) | promoter sequence (TRUNCATED) |
| 60 | DNA | AT-WUS | Arabidopsis thaliana WUS coding |
| | | | sequence |
| 61 | PRT | AT-WUS | Arabidopsis thaliana WUS protein |
| | | | sequence |
| 62 | DNA | LJ-WUS | Lotus japonicus WUS coding sequence |
| 63 | PRT | LJ-WUS | Lotus japonicus WUS protein sequence |
| 64 | DNA | GM-WUS | Glycine max WUS coding sequence |
| 65 | PRT | GM-WUS | Glycine max WUS protein sequence |
| 66 | DNA | CS-WUS | Camelina sativa WUS coding sequence |
| 67 | PRT | CS-WUS | Camelina sativa WUS protein sequence |
| 68 | DNA | CR-WUS | Capsella rubella WUS coding sequence |
| 69 | PRT | CR-WUS | Capsella rubella WUS protein sequence |
| 70 | DNA | AA-WUS | Arabis alpina WUS coding sequence |
| 71 | PRT | AA-WUS | Arabis alpina WUS protein sequence |
| 72 | DNA | RS-WUS | Raphanus sativus WUS coding sequence |
| 73 | PRT | RS-WUS | Raphanus sativus WUS protein sequence |
| 74 | DNA | BN-WUS | Brassica napus WUS coding sequence |
| 75 | PRT | BN-WUS | Brassica napus WUS protein sequence |
| 76 | DNA | BO-WUS | Brassica oleracea var. oleracea WUS |
| | | | coding sequence |
| 77 | PRT | BO-WUS | Brassica oleracea var. oleracea WUS |
| | | | protein sequence |
| 78 | DNA | HA-WUS | Helianthus annuus WUS coding |
| | | | sequence |
| 79 | PRT | HA-WUS | Helianthus annuus WUS protein |
| | | | sequence |
| 80 | DNA | PT-WUS | Populus trichocarpa WUS coding |
| | | (POPTR-WUS) | sequence |
| 81 | PRT | PT-WUS | Populus trichocarpa WUS protein |
| | | (POPTR-WUS) | sequence |
| 82 | DNA | VV-WUS | Vitis vinifera WUS coding sequence |
| | | (VITVI-WUS) | |
| 83 | PRT | VV-WUS | Vitis vinifera WUS protein sequence |
| | | (VITVI-WUS) | |
| 84 | DNA | AT-WUS | Arabidopsis thaliana WUS coding |
| | | | sequence (soy optimized) |
| 85 | PRT | AT-WUS | Arabidopsis thaliana WUS protein |
| | | | sequence |
| 86 | DNA | LJ-WUS | Lotus japonicus WUS coding sequence |
| | | | (soy optimized) |
| 87 | PRT | LJ-WUS | Lotus japonicus WUS protein sequence |
| 88 | DNA | MT-WUS | Medicago truncatula WUS coding |
| | | | sequence (soy optimized) |
| 89 | PRT | MT-WUS | Medicago truncatula WUS protein |
| | | | sequence |
| 90 | DNA | PH-WUS | Petunia hybrida WUS coding sequence |
| | | (PETHY-WUS) | (soy optimized) |
| 91 | PRT | PH-WUS | Petunia hybrida WUS protein sequence |
| | | (PETHY-WUS) | |
| 92 | DNA | PV-WUS | Phaseolus vulgaris WUS coding |
| | | | sequence (soy optimized) |
| 93 | PRT | PV-WUS | Phaseolus vulgaris WUS protein |
| | | | sequence |
| 94 | DNA | ZM-WUS1 | Zea mays WUS1 coding sequence |
| 95 | PRT | ZM-WUS1 | Zea mays WUS1 protein sequence |
| 96 | DNA | ZM-WUS2 | Zea mays WUS2 coding sequence |
| 97 | PRT | ZM-WUS2 | Zea mays WUS2 protein sequence |
| 98 | DNA | ZM-WUS3 | Zea mays WUS3 coding sequence |
| 99 | PRT | ZM-WUS3 | Zea mays WUS3 protein sequence |
| 100 | DNA | ZM-WOX2A | Zea mays WOX2A coding sequence |
| 101 | PRT | ZM-WOX2A | Zea mays WOX2A protein sequence |
| 102 | DNA | ZM-WOX4 | Zea mays WOX4 coding sequence |
| 103 | PRT | ZM-WOX4 | Zea mays WOX4 protein sequence |
| 104 | DNA | ZM-WOX5A | Zea mays WOX5A coding sequence |
| 105 | PRT | ZM-WOX5A | Zea mays WOX5A protein sequence |
| 106 | DNA | ZM-WOX9 | Zea mays WOX9 coding sequence |
| 107 | PRT | ZM-WOX9 | Zea mays WOX9 protein sequence |
| 108 | DNA | GM-HBSTART2 | Glycine max HB START2 |
| | | | (Homeodomain StAR-related lipid |
| | | | transfer2) promoter sequence |
| 109 | DNA | GM-MATE1 | Glycine max MATE1 (Multi- |
| | | | antimicrobial extrusion protein 1) |
| | | | promoter sequence |
| 110 | DNA | GM-NED1 | Glycine max NED1 (NAD dependent |
| | | | epimerase/dehydratase1) promoter |
| | | | sequence |
| 111 | DNA | PHP80728 | Synthetic construct comprising the T- |
| | | | DNA (RB to LB) (RB + GM-UBQ |
| | | | PRO::GM-UBQ INTRON1::TAG- |
| | | | RFP::UBQ3 TERM + GM-SAMS |
| | | | PRO::GM-SAMS INTRON1::GM- |
| | | | HRA::GM-ALS TERM + LB) |
| 112 | DNA | PHP80730 | Synthetic construct comprising the T- |
| | | | DNA (RB to LB) (RB + GM-LTP3 |
| | | | PRO::AT-WUS::UBQ14 TERM + GM- |
| | | | UBQ PRO::GM-UBQ INTRON1::TAG- |
| | | | RFP::UBQ3 TERM + GM-SAMS |
| | | | PRO::GM-SAMS INTRON1::GM- |
| | | | HRA::GM-ALS TERM + LB) |
| 113 | DNA | PHP80734 | Synthetic construct comprising the T- |
| | | | DNA (RB to LB) (RB + GM- |
| | | | HBSTART2 PRO::AT-WUS::UBQ14 |
| | | | TERM + GM-UBQ PRO::GM-UBQ |
| | | | INTRON1::TAG-RFP::UBQ3 TERM + |
| | | | GM-SAMS PRO::GM-SAMS |
| | | | INTRON1::GM-HRA::GM-ALS |
| | | | TERM + LB) |
| 114 | DNA | PHP80736 | Synthetic construct comprising the T- |
| | | | DNA (RB to LB) (RB + GM-MATE1 |
| | | | PRO::AT-WUS::UBQ14 TERM + GM- |
| | | | UBQ PRO::GM-UBQ INTRON1::TAG- |
| | | | RFP::UBQ3 TERM + GM-SAMS |
| | | | PRO::GM-SAMS INTRON1::GM- |
| | | | HRA::GM-ALS TERM + LB) |
| 115 | DNA | PHP81060 | Synthetic construct comprising the T- |
| | | | DNA (RB to LB) (RB + GM-NED1 |
| | | | PRO::AT-WUS::UBQ14 TERM + GM- |
| | | | UBQ PRO::GM-UBQ INTRON1::TAG- |
| | | | RFP::UBQ3 TERM + GM-SAMS |
| | | | PRO::GM-SAMS INTRON1::GM- |
| | | | HRA::GM-ALS TERM + LB) |
| 116 | DNA | PHP81343 | Synthetic construct comprising the T- |
| | | | DNA (RB to LB) (RB + GM- |
| | | | HBSTART3 PRO::AT-WUS::UBQ14 |
| | | | TERM + GM-UBQ PRO::GM-UBQ |
| | | | INTRON1::TAG-RFP::UBQ3 TERM + |
| | | | GM-SAMS PRO::GM-SAMS |
| | | | INTRON1::GM-HRA::GM-ALS |
| | | | TERM + LB) |
| 117 | DNA | QC318 | GM-EF1A PRO::GM-EF1A |
| | | | INTRON1::ZS-YELLOW::NOS TERM + |
| | | | GM-SAMS PRO::GM-SAMS |
| | | | INTRON1::GM-ALS::GM-ALS TERM |
| 118 | DNA | pVER9662 | AT-UBIQ10 PRO::AT-UBIQ10 |
| | | | INTRON1::AT-WUS::UBQ14 TERM |
| 119 | DNA | UBIGMWUS | AT-UBIQ10 PRO::AT-UBIQ10 |
| | | | INTRON1::GM-WUS:: UBQ3 TERM |
| 120 | DNA | UBIMTWUS | AT-UBIQ10 PRO::AT-UBIQ10 |
| | | | INTRON1::MT-WUS:: UBQ3 TERM |
| 121 | DNA | UBILJWUS | AT-UBIQ10 PRO::AT-UBIQ10 |
| | | | INTRON1::11-WUS:: UBQ3 TERM |
| 122 | DNA | UBIPVWUS | AT-UBIQ10 PRO::AT-UBIQ10 |
| | | | INTRON1::PV-WUS:: UBQ3 TERM |
| 123 | DNA | UBIPHWUS | AT-UBIQ10 PRO::AT-UBIQ10 |
| | | | INTRON1::PH-WUS:: UBQ3 TERM |
| 124 | DNA | GM-LTP3 | Glycine max LTP3 (Lipid Transfer |
| | | | Protein3) promoter sequence |
| 125 | DNA | AT-ML1 | Arabidopsis thaliana ML1 (MERISTEM |
| | | (TRUNCATED) | LAYER1) promoter sequence |
| | | | (TRUNCATED) |
| 126 | DNA | AT-CER6 | Arabidopsis thaliana CER6 |
| | | (TRUNCATED1) | (ECERIFERUM6) promoter sequence |
| | | | (TRUNCATED) |
| 127 | DNA | GG-WUS | Gnetum gnemon WUS coding sequence |
| | | (GNEGN-WUS) | |
| 128 | PRT | GG-WUS | Gnetum gnemon WUS protein sequence |
| | | (GNEGN-WUS) | |
| 129 | DNA | MD-WUS | Malus domestica WUS coding sequence |
| | | (MALDO-WUS) | |
| 130 | PRT | MD-WUS | Malus domestica WUS protein sequence |
| | | (MALDO-WUS) | |
| 131 | DNA | ME-WUS | Manihot esculenta WUS coding |
| | | (MANES-WUS) | sequence |
| 132 | PRT | ME-WUS | Manihot esculenta WUS protein |
| | | (MANES-WUS) | sequence |
| 133 | DNA | KF-WUS | Kalanchoe fedtschenkoi WUS coding |
| | | (KALFE-WUS) | sequence |
| 134 | PRT | KF-WUS | Kalanchoe fedtschenkoi WUS protein |
| | | (KALFE-WUS) | sequence |
| 135 | DNA | GH-WUS | Gossypium hirsutum WUS coding |
| | | (GOSHI-WUS) | sequence |
| 136 | PRT | GH-WUS | Gossypium hirsutum WUS protein |
| | | (GOSHI-WUS) | sequence |
| 137 | DNA | ZOSMA-WUS | Zostera marina WUS coding sequence |
| 138 | PRT | ZOSMA-WUS | Zostera marina WUS protein sequence |
| 139 | DNA | AMBTR-WUS | Amborella trichopoda WUS coding |
| | | | sequence |
| 140 | PRT | AMBTR-WUS | Amborella trichopoda WUS protein |
| | | | sequence |
| 141 | DNA | AC-WUS | Aquilegia coerulea WUS coding |
| | | (AQUCO-WUS) | sequence |
| 142 | PRT | AC-WUS | Aquilegia coerulea WUS protein |
| | | (AQUCO-WUS) | sequence |
| 143 | DNA | AH-WUS | Amaranthus hypochondriacus WUS |
| | | (AMAHY-WUS) | coding sequence |
| 144 | PRT | AH-WUS | Amaranthus hypochondriacus WUS |
| | | (AMAHY-WUS) | protein sequence |
| 145 | DNA | CUCSA-WUS | Cucumis sativus WUS coding sequence |
| 146 | PRT | CUCSA-WUS | Cucumis sativus WUS protein sequence |
| 147 | DNA | PINTA-WUS | Pinus taeda WUS coding sequence |
| 148 | PRT | PINTA-WUS | Pinus taeda WUS protein sequence |
| 149 | DNA | AT-PDF1 | Arabidopsis thaliana PDF1 |
| | | (TRUNCATED) | (PROTODERMAL FACTOR1) |
| | | | promoter sequence (TRUNCATED) |
| 150 | DNA | AT-PDF2 | Arabidopsis thaliana PDF1 |
| | | (TRUNCATED) | (PROTODERMAL FACTOR1) |
| | | | promoter sequence (TRUNCATED) |
| 151 | DNA | AT-HDG2 | Arabidopsis thaliana HDG2 |
| | | (TRUNCATED) | (HOMEODOMAIN GLABROUS2) |
| | | | promoter sequence (TRUNCATED) |
| 152 | DNA | AT-ANL2 | Arabidopsis thaliana Anthocyanless2 |
| | | | promoter |
| 153 | DNA | RV021090 | Synthetic construct comprising the T- |
| | | | DNA (RB to LB): RB + CAMV35S |
| | | | PRO::HA-WUS::OS-T28 TERM + GM- |
| | | | UBQ PRO::GM-UBQ 5’ UTR::GM- |
| | | | UBQ INTRON1::ZS-YELLOW1 |
| | | | N1::NOS TERM + AT-UBIQ10 |
| | | | PRO::AT-UBIQ10 5’ UTR::AT-UBIQ10 |
| | | | INTRON1::CTP::SPCN::UBQ14 |
| | | | TERM + LB |
| 154 | DNA | RV026522 | T-DNA with GNEGN-WUS (GG - |
| | | | Gnetum gnemon) |
| | | | Synthetic construct comprising the T- |
| | | | DNA (RB to LB): RB + CAMV35S |
| | | | PRO:: GG-WUS::OS-T28 TERM + GM- |
| | | | UBQ PRO::GM-UBQ 5UTR::GM-UBQ |
| | | | INTRON1::ZS-YELLOW1 N1::NOS |
| | | | TERM + AT-UBIQ10 PRO::AT- |
| | | | UBIQ10 5UTR::AT-UBIQ10 |
| | | | INTRON1::CTP::SPCN::UBQ14 |
| | | | TERM + GM-EF1A2 PRO::GM-EF1A2 |
| | | | 5’ UTR::GM-EF1A2 INTRON1::DS- |
| | | | RED2::UBQ TERM + LB |
| 155 | DNA | RV026526 | T-DNA with VITVI-WUS (VV - Vitis |
| | | | vinifera) |
| | | | Synthetic construct comprising the T- |
| | | | DNA (RB to LB): RB + CAMV35S |
| | | | PRO::VV-WUS::OS-T28 TERM + GM- |
| | | | UBQ PRO::GM-UBQ 5’ UTR::GM- |
| | | | UBQ INTRON1::ZS-YELLOW1 |
| | | | N1::NOS TERM + AT-UBIQ10 |
| | | | PRO::AT-UBIQ10 5’ UTR::AT-UBIQ10 |
| | | | INTRON1::CTP::SPCN::UBQ14 |
| | | | TERM + GM-EF1A2 PRO::GM-EF1A2 |
| | | | 5’ UTR::GM-EF1A2 INTRON1::DS- |
| | | | RED2::UBQ TERM + LB |
| 156 | DNA | RV026534 | T-DNA with PETHY-WUS (PH - |
| | | | Petunia hybrida) |
| | | | Synthetic construct comprising the T- |
| | | | DNA (RB to LB): RB + CAMV35S |
| | | | PRO::PH-WUS::OS-T28 TERM + GM- |
| | | | UBQ PRO::GM-UBQ 5’ UTR::GM- |
| | | | UBQ INTRON1::ZS-YELLOW1 |
| | | | N1::NOS TERM + AT-UBIQ10 |
| | | | PRO::AT-UBIQ10 5’ UTR::AT-UBIQ10 |
| | | | INTRON1::CTP::SPCN::UBQ14 |
| | | | TERM + GM-EF1A2 PRO::GM-EF1A2 |
| | | | 5’ UTR::GM-EF1A2 INTRON1::DS- |
| | | | RED2::UBQ TERM + LB |
| 157 | DNA | RV026531 | T-DNA with MALDO-WUS (MD - |
| | | | Malus domestica) |
| | | | Synthetic construct comprising the T- |
| | | | DNA (RB to LB): RB + CAMV35S |
| | | | PRO::MD-WUS::OS-T28 TERM + GM- |
| | | | UBQ PRO::GM-UBQ 5UTR::GM-UBQ |
| | | | INTRON1::ZS-YELLOW1 N1::NOS |
| | | | TERM + AT-UBIQ10 PRO:: AT- |
| | | | UBIQ10 5UTR::AT-UBIQ10 |
| | | | INTRON1::CTP::SPCN::UBQ14 |
| | | | TERM + GM-EF1A2 PRO::GM-EF1A2 |
| | | | 5’ UTR::GM-EF1A2 INTRON1::DS- |
| | | | RED2::UBQ TERM + LB |
| 158 | DNA | RV026524 | T-DNA with MANES-WUS (ME - |
| | | | Manihot esculenta) |
| | | | Synthetic construct comprising the T- |
| | | | DNA (RB to LB): RB + CAMV35S |
| | | | PRO::ME-WUS::OS-T28 TERM + GM- |
| | | | UBQ PRO::GM-UBQ 5’ UTR::GM- |
| | | | UBQ INTRON1::ZS-YELLOW1 |
| | | | N1::NOS TERM + AT-UBIQ10 |
| | | | PRO::AT-UBIQ10 5’ UTR::AT-UBIQ10 |
| | | | INTRON1::CTP::SPCN::UBQ14 |
| | | | TERM + GM-EF1A2 PRO::GM-EF1A2 |
| | | | 5’ UTR::GM-EF1A2 INTRON1::DS- |
| | | | RED2::UBQ TERM + LB |
| 159 | DNA | RV026523 | T-DNA with KALFE-WUS (KF - |
| | | | Kalanchoe fedtschenkoi) |
| | | | Synthetic construct comprising the T- |
| | | | DNA (RB to LB): RB + CAMV35S |
| | | | PRO::KF-WUS::OS-T28 TERM +GM- |
| | | | UBQ PRO::GM-UBQ 5’ UTR::GM- |
| | | | UBQ INTRON1::ZS-YELLOW1 |
| | | | N1::NOS TERM + AT-UBIQ10 |
| | | | PRO::AT-UBIQ10 5’ UTR::AT-UBIQ10 |
| | | | INTRON1::CTP::SPCN::UBQ14 |
| | | | TERM + GM-EF1A2 PRO::GM-EF1A2 |
| | | | 5’ UTR::GM-EF1A2 INTRON1::DS- |
| | | | RED2::UBQ TERM + LB |
| 160 | DNA | RV026530 | T-DNA with GOSHI-WUS (GH - |
| | | | Gossypium hirsutum) |
| | | | Synthetic construct comprising the T- |
| | | | DNA (RB to LB): RB + CAMV35S |
| | | | PRO::GH-WUS::OS-T28 TERM + GM- |
| | | | UBQ PRO::GM-UBQ 5’ UTR::GM- |
| | | | UBQ INTRON1::ZS-YELLOW1 |
| | | | N1::NOS TERM + AT-UBIQ10 |
| | | | PRO::AT-UBIQ10 5’ UTR::AT- |
| | | | UBIQ10 |
| | | | INTRON1::CTP::SPCN::UBQ14 |
| | | | TERM + GM-EF1A2 PRO::GM-EF1A2 |
| | | | 5’ UTR::GM-EF1A2 INTRON1::DS- |
| | | | RED2::UBQ TERM + LB |
| 161 | DNA | RV026527 | T-DNA with ZOSMA-WUS (Zostera |
| | | | marina) |
| | | | Synthetic construct comprising the T- |
| | | | DNA (RB to LB): RB + CAMV35S |
| | | | PRO::ZOSMA-WUS::OS-T28 TERM + |
| | | | GM-UBQ PRO::GM-UBQ 5’ |
| | | | UTR::GM-UBQ INTRON1::ZS- |
| | | | YELLOW1 N1::NOS TERM + AT- |
| | | | UBIQ10 PRO::AT-UBIQ10 5’ |
| | | | UTR::AT-UBIQ10 |
| | | | INTRON1::CTP::SPCN::UBQ14 |
| | | | TERM + GM-EF1A2 PRO::GM-EF1A2 |
| | | | 5’ UTR::GM-EF1A2 INTRON1::DS- |
| | | | RED2::UBQ TERM + LB |
| 162 | DNA | RV026529 | T-DNA with AMB TR-WUS (Amborella |
| | | | trichopoda) |
| | | | Synthetic construct comprising the T- |
| | | | DNA (RB to LB): RB + CAMV35S |
| | | | PRO::AMBTR-WUS::OS-T28 TERM + |
| | | | GM-UBQ PRO::GM-UBQ 5’ |
| | | | UTR::GM-UBQ INTRON1::ZS- |
| | | | YELLOW1 N1::NOS TERM + AT- |
| | | | UBIQ10 PRO::AT-UBIQ10 5’ |
| | | | UTR::AT-UBIQ10 |
| | | | INTRON1::CTP::SPCN::UBQ14 |
| | | | TERM + GM-EF1A2 PRO::GM-EF1A2 |
| | | | 5’ UTR::GM-EF1A2 INTRON1::DS- |
| | | | RED2::UBQ TERM + LB |
| 163 | DNA | RV026528 | T-DNA with AQUCO-WUS (Aquilegia |
| | | | coerulea) |
| | | | Synthetic construct comprising the T- |
| | | | DNA (RB to LB): RB + CAMV35S |
| | | | PRO::AC-WUS::OS-T28 TERM + GM- |
| | | | UBQ PRO::GM-UBQ 5’ UTR::GM- |
| | | | UBQ INTRON1::ZS-YELLOW1 |
| | | | N1::NOS TERM + AT-UBIQ10 |
| | | | PRO::AT-UBIQ10 5’ UTR::AT-UBIQ10 |
| | | | INTRON1::CTP::SPCN::UBQ14 |
| | | | TERM + GM-EF1A2 PRO::GM-EF1A2 |
| | | | 5’ UTR::GM-EF1A2 INTRON1::DS- |
| | | | RED2::UBQ TERM + LB |
| 164 | DNA | RV026520 | T-DNA with POPTR-WUS (Populus |
| | | | trichocarpa) |
| | | | Synthetic construct comprising the T- |
| | | | DNA (RB to LB): RB + CAMV35S |
| | | | PRO::PT-WUS::OS-T28 TERM + GM- |
| | | | UBQ PRO::GM-UBQ 5’ UTR::GM- |
| | | | UBQ INTRON1::ZS-YELLOW1 |
| | | | N1::NOS TERM + AT-UBIQ10 |
| | | | PRO::AT-UBIQ10 5; UTR::AT-UBIQ10 |
| | | | INTRON1::CTP::SPCN::UBQ14 |
| | | | TERM + GM-EF1A2 PRO::GM-EF1A2 |
| | | | 5’ UTR::GM-EF1A2 INTRON1::DS- |
| | | | RED2::UBQ TERM + LB |
| 165 | DNA | RV026533 | T-DNA with AMAHY-WUS |
| | | | (Amaranthus hypochondriacus) |
| | | | Synthetic construct comprising the T- |
| | | | DNA (RB to LB): RB + CAMV35S |
| | | | PRO::AH-WUS::OS-T28 TERM + GM- |
| | | | UBQ PRO::GM-UBQ 5’ UTR::GM- |
| | | | UBQ INTRON1::ZS-YELLOW1 |
| | | | N1::NOS TERM + AT-UBIQ10 |
| | | | PRO::AT-UBIQ10 5’ UTR::AT-UBIQ10 |
| | | | INTRON1::CTP::SPCN::UBQ14 |
| | | | TERM + GM-EF1A2 PRO::GM-EF1A2 |
| | | | 5’ UTR::GM-EF1A2 INTRON1::DS- |
| | | | RED2::UBQ TERM + LB |
| 166 | DNA | RV026521 | T-DNA with CUCSA-WUS (Cucumis |
| | | | sativus) |
| | | | Synthetic construct comprising the T- |
| | | | DNA (RB to LB): RB + CAMV35S |
| | | | PRO::CS-WUS::OS-T28 TERM + GM- |
| | | | UBQ PRO::GM-UBQ 5’ UTR::GM- |
| | | | UBQ INTRON1::ZS-YELLOW1 |
| | | | N1::NOS TERM +AT-UBIQ10 |
| | | | PRO::AT-UBIQ10 5’ UTR::AT-UBIQ10 |
| | | | INTRON1::CTP::SPCN::UBQ14 |
| | | | TERM + GM-EF1A2 PRO::GM-EF1A2 |
| | | | 5’ UTR::GM-EF1A2 INTRON1::DS- |
| | | | RED2::UBQ TERM + LB |
| 167 | DNA | RV026525 | T-DNA with PINTA-WUS (Pinus taeda) |
| | | | Synthetic construct comprising the T- |
| | | | DNA (RB to LB): RB + CAMV35S |
| | | | PRO::PINTA-WUS::OS-T28 TERM + |
| | | | GM-UBQ PRO::GM-UBQ 5’ |
| | | | UTR::GM-UBQ INTRON1::ZS- |
| | | | YELLOW1 N1::NOS TERM + AT- |
| | | | UBIQ10 PRO::AT-UBIQ10 5’ |
| | | | UTR::AT-UBIQ10 |
| | | | INTRON1::CTP::SPCN::UBQ14 |
| | | | TERM + GM-EF1A2 PRO::GM-EF1A2 |
| | | | 5’ UTR::GM-EF1A2 INTRON1::DS- |
| | | | RED2::UBQ TERM + LB |
| 168 | DNA | RV022814 | T-DNA with NO WUS cassette |
| | | | Synthetic construct comprising the T- |
| | | | DNA (RB to LB): RB + CCDB + GM- |
| | | | UBQ PRO-V1::GM-UBQ 5’ UTR::GM- |
| | | | UBQ INTRON1::CTP::SPCN::UBQ14 |
| | | | TERM + GM-EF1A2 PRO:: GM-EF1A2 |
| | | | 5’ UTR:: GM-EF1A2 INTRON1:: GM- |
| | | | EF1A2 5’ UTR::DS-RED2::UBQ3 |
| | | | TERM + LB |
| 169 | DNA | RV027344 | T-DNA with AT-PDF2 PRO |
| | | | Synthetic construct comprising the T- |
| | | | DNA (RB to LB): RB + AT-PDF2 |
| | | | PRO::HA-WUS::OS-T28 TERM + GM- |
| | | | UBQ PRO::GM-UBQ 5’ UTR::GM- |
| | | | UBQ INTRON1::ZS-YELLOW1 |
| | | | N1::NOS TERM + AT-UBIQ10 |
| | | | PRO::AT-UBIQ10 5’ UTR::AT-UBIQ10 |
| | | | INTRON1::CTP::SPCN::UBQ14 |
| | | | TERM + GM-EF1A2 PRO::GM-EF1A2 |
| | | | 5’ UTR::GM-EF1A2 INTRON1::DS- |
| | | | RED2::UBQ TERM + LB |
| 170 | DNA | RV026532 | T-DNA for PRO TEST NEG-NO WUS |
| | | | Synthetic construct comprising the T- |
| | | | DNA (RB to LB): RB + GM-UBQ |
| | | | PRO-V1::GM-UBQ 5’ UTR::GM-UBQ |
| | | | INTRON1::ZS-YELLOW1 N1::NOS |
| | | | TERM + GM-UBQ PRO-V1::GM-UBQ |
| | | | 5’ UTR::GM-UBQ |
| | | | INTRON1::CTP::SPCN::UBQ14 |
| | | | TERM + GM-EF1A2 PRO:: GM-EF1A2 |
| | | | 5’ UTR:: GM-EF1A2 INTRON1:: GM- |
| | | | EF1A2 5’ UTR::DS-RED2::UBQ3 |
| | | | TERM + LB |
| 171 | DNA | RV027337 | T-DNA with AT-ANL2 PRO |
| | | | Synthetic construct comprising the T- |
| | | | DNA (RB to LB): RB + AT-ANL2 |
| | | | PRO::HA-WUS::OS-T28 TERM + GM- |
| | | | UBQ PRO::GM-UBQ 5’ UTR::GM- |
| | | | UBQ INTRON1::ZS-YELLOW1 |
| | | | N1::NOS TERM + AT-UBIQ10 |
| | | | PRO::AT-UBIQ10 5’ UTR::AT-UBIQ10 |
| | | | INTRON1::CTP::SPCN::UBQ14 |
| | | | TERM + GM-EF1A2 PRO::GM-EF1A2 |
| | | | 5’ UTR::GM-EF1A2 INTRON1::DS- |
| | | | RED2::UBQ TERM + LB |
| 172 | DNA | RV027338 | T-DNA with AT-CER6 PRO |
| | | | Synthetic construct comprising the T- |
| | | | DNA (RB to LB): RB + AT-CER6 |
| | | | PRO::HA-WUS::OS-T28 TERM + GM- |
| | | | UBQ PRO::GM-UBQ 5’ UTR::GM- |
| | | | UBQ INTRON1::ZS-YELLOW1 |
| | | | N1::NOS TERM + AT-UBIQ10 |
| | | | PRO::AT-UBIQ10 5’ UTR::AT-UBIQ10 |
| | | | INTRON1::CTP::SPCN::UBQ14 |
| | | | TERM + GM-EF1A2 PRO::GM-EF1A2 |
| | | | 5’ UTR::GM-EF1A2 INTRON1::DS- |
| | | | RED2::UBQ TERM + LB |
| 173 | DNA | RV027340 | T-DNA with AT-HDG2 PRO |
| | | | Synthetic construct comprising the T- |
| | | | DNA (RB to LB): RB + AT-HDG2 |
| | | | PRO::HA-WUS::OS-T28 TERM + GM- |
| | | | UBQ PRO::GM-UBQ 5’ UTR::GM- |
| | | | UBQ INTRON1::ZS-YELLOW1 |
| | | | N1::NOS TERM + AT-UBIQ10 |
| | | | PRO::AT-UBIQ10 5’ UTR::AT-UBIQ10 |
| | | | INTRON1::CTP::SPCN::UBQ14 |
| | | | TERM + GM-EF1A2 PRO::GM-EF1A2 |
| | | | 5’ UTR::GM-EF1A2INTRON1::DS- |
| | | | RED2::UBQ TERM + LB |
| 174 | DNA | RV027342 | T-DNA with AT-ML1 PRO |
| | | | Synthetic construct comprising the T- |
| | | | DNA (RB to LB): RB + AT-ML1 |
| | | | PRO::HA-WUS::OS-T28 TERM + GM- |
| | | | UBQ PRO::GM-UBQ 5’ UTR::GM- |
| | | | UBQ INTRON1::ZS-YELLOW1 |
| | | | N1::NOS TERM + AT-UBIQ10 |
| | | | PRO::AT-UBIQ10 5’ UTR::AT-UBIQ10 |
| | | | INTRON1::CTP::SPCN::UBQ14 |
| | | | TERM + GM-EF1A2 PRO::GM-EF1A2 |
| | | | 5’ UTR::GM-EF1A2 INTRON1::DS- |
| | | | RED2::UBQ TERM + LB |
| 175 | DNA | RV027343 | T-DNA with AT-PDF1 PRO |
| | | | Synthetic construct comprising the T- |
| | | | DNA (RB to LB): RB + AT-PDF1 |
| | | | PRO::HA-WUS::OS-T28 TERM + GM- |
| | | | UBQ PRO::GM-UBQ 5’ UTR::GM- |
| | | | UBQ INTRON1::ZS-YELLOW1 |
| | | | N1::NOS TERM + AT-UBIQ10 |
| | | | PRO::AT-UBIQ10 5’ UTR::AT-UBIQ10 |
| | | | INTRON1::CTP::SPCN::UBQ14 |
| | | | TERM + GM-EF1A2 PRO::GM-EF1A2 |
| | | | 5’ UTR::GM-EF1A2 INTRON1::DS- |
| | | | RED2::UBQ TERM +LB |
| 176 | DNA | PCR Target1 | Synthetic sequence PCR Target1 |
| 177 | DNA | PCR Target2 | Synthetic sequence PCR Target2 |
| 178 | DNA | PCR Target3 | Synthetic sequence PCR Target3 |
| 179 | DNA | PCR Target4 | Synthetic sequence PCR Target4 |
| 180 | DNA | PCR Target5 | Synthetic sequence PCR Target5 |
| 181 | DNA | PCR Target6 | Synthetic sequence PCR Target6 |
| 182 | DNA | PCR Target7 | Synthetic sequence PCR Target7 |
| 183 | DNA | PCR Target8 | Synthetic sequence PCR Target8 |
| 184 | DNA | PCR Target9 | Synthetic sequence PCR Target9 |
| 185 | DNA | PCR Target10 | Synthetic sequence PCR Target10 |
| 186 | DNA | PCR Target11 | Synthetic sequence PCR Target11 |
| 187 | DNA | PCR Target12 | Synthetic sequence PCR Target12 |
| 188 | DNA | PCR Target13 | Synthetic sequence PCR Target13 |
| 189 | DNA | AT-CER6 | Arabidopsis thaliana CER6 |
| | | (TRUNCATED2) | (ECERIFERUM6) promoter sequence |
| | | | (TRUNCATED2) |
| 190 | DNA | RV029482 | T-DNA with ALA-NLS-GG-WUS + |
| | | | HSP:CRE |
| | | | Synthetic construct comprising the T- |
| | | | DNA (RB to LB): RB + LOXP + AT- |
| | | | UBIQ10 PRO::AT-NLS:GG-WUS::OS- |
| | | | T28 TERM + AT-HSP811L PRO::MO- |
| | | | CRE EXON1:ST-LS1 INTRON2:MO- |
| | | | CRE EXON2::SB-GKAF TERM + |
| | | | LOXP + GM-UBQ PRO-V1:GM-UBQ |
| | | | 5UTR:QM-UBQ |
| | | | INTRON1::CTP:SPCN::UBQ14 |
| | | | TERM + GMEF1A2 PRO::GM-EF1A2 |
| | | | 5UTR1::GM-EF1A2 INTRON1::GM- |
| | | | EF1A2 5UTR2::DS-RED2::UBQ3 |
| | | | TERM + LB |
| 191 | DNA | RV029481 | T-DNA with GG-WUS + HSP:CRE + |
| | | | IPT |
| | | | Synthetic construct comprising the T- |
| | | | DNA (RB to LB): RB + LOXP + AT- |
| | | | UBIQ10 PRO::GG-WUS::OS-T28 |
| | | | TERM + AT-UBI14 PRO:AT-UBI14 |
| | | | 5UTR:AT-UBI14 |
| | | | INTRON::IPT::PHASEOLIN TERM + |
| | | | AT-HSP811L PRO::MO-CRE |
| | | | EXON1:ST-LS1 INTRON2:MO-CRE |
| | | | EXON2::SB-GKAF TERM + LOXP + |
| | | | GM-UBQ PRO-V1:GM-UBQ |
| | | | 5UTR:QM-UBQ |
| | | | INTRON1::CTP:SPCN::UBQ14 |
| | | | TERM + GMEF1A2 PRO::GM-EF1A2 |
| | | | 5UTR1::GM-EF1A2 INTRON1:: GM- |
| | | | EF1A2 5UTR2::DS-RED2::UBQ3 |
| | | | TERM + LB |
| 192 | DNA | RV029631 | T-DNA with GG-WUS + HSP:CRE |
| | | | Synthetic construct comprising the T- |
| | | | DNA (RB to LB): RB + LOXP + AT- |
| | | | UBIQ10 PRO::GG-WUS::OS-T28 |
| | | | TERM + AT-HSP811L PRO::MO-CRE |
| | | | EXON1:ST-LS1 INTRON2:MO-CRE |
| | | | EXON2::SB-GKAF TERM + LOXP + |
| | | | GM-UBQ PRO-V1:GM-UBQ |
| | | | 5UTR:QM-UBQ |
| | | | INTRON1::CTP:SPCN::UBQ14 |
| | | | TERM + GMEF1A2 PRO::GM-EF1A2 |
| | | | 5UTR1::GM-EF1A2 INTRON1:: GM- |
| | | | EF1A2 5UTR2::DS-RED2::UBQ3 |
| | | | TERM + LB |
| 193 | DNA | RV029630 | T-DNA with PT-WUS + HSP:CRE |
| | | | Synthetic construct comprising the T- |
| | | | DNA (RB to LB): RB + LOXP + AT- |
| | | | UBIQ10 PRO::PT-WUS::OS-T28 |
| | | | TERM + AT-HSP811L PRO::MO-CRE |
| | | | EXON1:ST-LS1 INTRON2:MO-CRE |
| | | | EXON2::SB-GKAF TERM + LOXP + |
| | | | GM-UBQ PRO-V1:GM-UBQ |
| | | | 5UTR:QM-UBQ |
| | | | INTRON1::CTP:SPCN::UBQ14 |
| | | | TERM + GMEF1A2 PRO::GM-EF1A2 |
| | | | 5UTR1::GM-EF1A2 INTRON1:: GM- |
| | | | EF1A2 5UTR2::DS-RED2::UBQ3 |
| | | | TERM + LB |
| 194 | DNA | RV029480 | T-DNA with ALA-NLS-PT -WUS + |
| | | | HSP:CRE |
| | | | Synthetic construct comprising the T- |
| | | | DNA (RB to LB): RB + LOXP + AT- |
| | | | UBIQ10 PRO::NLS:PT-WUS::OS-T28 |
| | | | TERM + AT-HSP811L PRO::MO-CRE |
| | | | EXON1:ST-LS1 INTRON2:MO-CRE |
| | | | EXON2::SB-GKAF TERM + LOXP + |
| | | | GM-UBQ PRO-V1:GM-UBQ |
| | | | 5UTR:QM-UBQ |
| | | | INTRON1::CTP:SPCN::UBQ14 |
| | | | TERM + GMEF1A2 PRO::GM-EF1A2 |
| | | | 5UTR1::GM-EF1A2 INTRON1:: GM- |
| | | | EF1A2 5UTR2::DS-RED2::UBQ3 |
| | | | TERM + LB |
| 195 | DNA | RV029479 | T-DNA with PT-WUS + HSP:CRE + IPT |
| | | | Synthetic construct comprising the T- |
| | | | DNA (RB to LB): RB+ LOXP + AT- |
| | | | UBIQ10 PRO:: PT-WUS::OS-T28 |
| | | | TERM + AT-UBI14 PRO:AT-UBI14 |
| | | | 5UTR:AT-UBI14 |
| | | | INTRON::IPT::PHASEOLIN TERM + |
| | | | AT-HSP811L PRO::MO-CRE |
| | | | EXON1:ST-LS1 INTRON2:MO-CRE |
| | | | EXON2::SB-GKAF TERM + LOXP + |
| | | | GM-UBQ PRO-V1:GM-UBQ |
| | | | 5UTR:QM-UBQ |
| | | | INTRON1::CTP:SPCN::UBQ14 |
| | | | TERM + GMEF1A2 PRO::GM-EF1A2 |
| | | | 5UTR1::GM-EF1A2 INTRON1:: GM- |
| | | | EF1A2 5UTR2::DS-RED2::UBQ3 |
| | | | TERM + LB |
| 196 | DNA | RV026592 | Synthetic construct comprising the T- |
| | | | DNA with Solanum lycopersicum WUS |
| | | | gene (SL-WUS) (RB to LB): |
| | | | RB + CAMV35S PRO::SL-WUS- |
| | | | V1::OS-T28 TERM + GM-UBQ |
| | | | PRO::GM-UBQ 5’ UTR::GM-UBQ |
| | | | INTRON1::ZS-YELLOW1 N1::NOS |
| | | | TERM + GM-UBQ PRO::GM-UBQ 5’ |
| | | | UTR::GM-UBQ |
| | | | INTRON1::CTP::SPCN::UBQ14 |
| | | | TERM + GM-EF1A2 PRO::GM-EF1A2 |
| | | | 5’ UTR::GM-EF1A2 INTRON1::DS- |
| | | | RED2::UBQ TERM + LB |
| 197 | DNA | SL-WUS | WUS ortholog of Solanum lycopersicum |
| | | | with KpnI site replaced by changing C to |
| | | | T at 762bpcoding sequence |
| 198 | PRT | SL-WUS | Solanum lycopersicum WUS protein |
| | | | sequence |

[0166] The following examples are offered by way of illustration and not by way of limitation.

### EXAMPLES

[0167] The aspects of the disclosure are further defined in the following Examples, in which parts and percentages are by weight and degrees are Celsius, unless otherwise stated. These Examples, while indicating aspects of the disclosure, are given by way of illustration only. From the above discussion and these Examples, one skilled in the art can ascertain the essential characteristics of the aspects of the disclosure, and without departing from the spirit and scope thereof, can make various changes and modifications of them to adapt to various usages and conditions. Thus, various modifications in addition to those shown and described herein will be apparent to those skilled in the art from the foregoing description. Such modifications are also intended to fall within the scope of the appended claims.

### Example 1: Plant Materials and Media Compositions

[0168] A wide range of tissue or explant types can be used in the current method, including vegetative plant organs and their composite tissues including but are not limited to leaf explants, leaf primordia, stipule, cotyledons, cotyledonary nodes, mesocotyl, stem explants, primary roots, lateral secondary roots, root segments, buds, and meristems, including but not limited to apical meristems, root meristems, secondary meristems, axillary meristems, and floral meristems. The compositions of various media used in soybean transformation, tissue culture and regeneration are outlined in Table 4. In this table, medium M1 is used for initiation of suspension cultures, if this is the starting material for transformation. Media M2 and M3 represent typical co-cultivation media useful for Agrobacterium transformation of the entire range of explants listed above. Medium M4 is useful for selection (with the appropriate selective agent), M5 is used for somatic embryo maturation, and medium M6 is used for germination to produce T0 plantlets.

TABLE 4
Composition of Cultivation Media M1-M6.

| | | | | | |
|---|---|---|---|---|---|
| M1 | M2 | M3 | M4 | M5 | M6 |

| | | | | | | | | | | | | |
|---|---|---|---|---|---|---|---|---|---|---|---|---|
| MS salt with | 4.44 | g/L | | | | | 4.4 | g/L | 4.44 | g/L | | |
| B5 vitamins | | | | | | | | | | | | |
| (PhytoTech | | | | | | | | | | | | |
| M404) | | | | | | | | | | | | |
| Gamborg B-5 | | | | | | | | | | | 3.21 | g/L |
| basal medium | | | | | | | | | | | | |
| (PhytoTech | | | | | | | | | | | | |
| G398) | | | | | | | | | | | | |
| Modified MS | | | 2.68 | g/L | 2.68 | g/L | | | | | | |
| salt | | | | | | | | | | | | |
| (PhytoTech | | | | | | | | | | | | |
| M571) | | | | | | | | | | | | |
| B5 vitamins | | | 1 | ml | 1 | ml | 1 | ml | | | | |
| (1000X) | | | | | | | | | | | | |
| (PhytoTech | | | | | | | | | | | | |
| G249) | | | | | | | | | | | | |
| 2,4-D stock 10 | 4 | ml | 1 | ml | 1 | ml | 4 | ml | | | | |
| mg/ml | | | | | | | | | | | | |
| KNO₃ | | | 1.64 | g/L | 1.64 | g/L | | | | | | |
| (NH₄)₂SO₄ | | | 0.463 | g/L | 0.463 | g/L | | | | | | |
| Asparagine | | | 1 | g/L | 1 | g/L | | | | | | |
| Sucrose | | | 68.5 | g/L | 85.6 | g/L | | | | | 20 | g/L |
| Glucose | 31.5 | g/L | 36 | g/L | 49.6 | g/L | 31.5 | g/l | | | | |
| Maltose | | | | | | | | | 60 | g/L | | |
| MgCl₂•6H₂O | | | | | | | | | 0.75 | g/L | | |
| Activated | | | | | | | | | 5 | g/L | | |
| charcoal | | | | | | | | | | | | |
| (PhytoTech | | | | | | | | | | | | |
| C325) | | | | | | | | | | | | |
| Casein | | | 1 | g/L | 1 | g/L | | | | | | |
| hydrolysate | | | | | | | | | | | | |
| (PhytoTech | | | | | | | | | | | | |
| C184) | | | | | | | | | | | | |

| | | | | | | |
|---|---|---|---|---|---|---|
| pH | 7.0 | 5.4 | 5.4 | 7.0 | 5.7 | 5.7 |

| | | | | | | | | | | | | |
|---|---|---|---|---|---|---|---|---|---|---|---|---|
| Acetosyringone | | | 300 | μM | 300 | μM | | | | | | |
| TC agar | 4 | g/L | | | | | | | | | 5 | g/L |
| Gelrite (Plant | | | | | | | | | | | | |
| Media Cat# | | | | | | | 2 | g/l | 2 | g/L | | |
| 714246) | | | | | | | | | | | | |

[0169] After 1-5 days of co-culture, the tissue is cultured on M3 medium with no selection for one week (recovery period), and then moved onto selection. For selection, an antibiotic or herbicide is added to M3 medium for the selection of stable transformants. To begin counter-selection against Agrobacterium, 300 mg/l Timentin® (sterile ticarcillin disodium mixed with clavulanate potassium, PlantMedia, Dublin, Ohio, USA) is also added, and both the selective agent and Timentin® are maintained in the medium throughout selection (up to total 8 weeks). The selective media is replaced weekly. After 6-8 weeks on selective medium, transformed tissue becomes visible as green tissue against a background of bleached (or necrotic), less healthy tissue. These pieces of tissue are cultured for an additional 4-8 weeks.

[0170] Green and healthy somatic embryos are then transferred to M5 media containing 100 mg/L Timentin®. After a total of 4 weeks of maturation on M5 media, mature somatic embryos are placed in a sterile, empty Petri dish, sealed with Micropore™ tape (3M Health Care, St. Paul, Minn., USA) or placed in a plastic box (with no fiber tape) for 4-7 days at room temperature.

[0171] Desiccated embryos are planted in M6 media where they are left to germinate at 26° C. with an 18-hour photoperiod at 60-100 μE/m²/s light intensity. After 4-6 weeks in germination media, the plantlets are transferred to moistened Jiffy-7 peat pellets (Jiffy Products Ltd, Shippagan, Canada), and kept enclosed in clear plastic tray boxes until acclimatized in a Percival incubator under the following conditions, a 16-hour photoperiod at 60-100 μE/m²/s, 26° C./24° C. day/night temperatures. Finally, hardened plantlets are potted in 2-gallon pots containing moistened SunGro 702 and grown to maturity, bearing seed, in a greenhouse.

### Example 2: Transformation of Soybean

[0172] Standard protocols for particle bombardment (Finer and McMullen, 1991, In Vitro Cell Dev. Biol.-Plant 27:175-182), Agrobacterium-mediated transformation (Jia et al., 2015, Int J. Mol. Sci. 16:18552-18543; US20170121722 incorporated herein by reference in its entirety), Ochrobactrum-mediated transformation (US20180216123 incorporated herein by reference in its entirety) or Rhizobiaceae-mediated transformation (U.S. Pat. No. 9,365,859 incorporated herein by reference in its entirety) for soybean can be used with the methods of the disclosure.

[0173] Media useful in soybean transformation are listed in Table 5.

TABLE 5

Infection medium (101S): 1 g/L L-Asparagine; 0.4630 g/L
Ammonium Sulfate; 1.64 g/L Potassium Nitrate; 68.5 g/L
Sucrose; 36 g/L Glucose; 2.68 g/L Modified Basal Salt Mixture;
1 g/L Casein Hydrolysate (Acid); 1 ml/L 36N-Gamborg B5
Vitamins 1000X; 10 mg/ml 2,4-D; pH 5.4.
Co-cultivation medium (562V): 4 g/L CHU(N6) basal salts;
1 ml/L1000x Erikssons vitamins; 1.25 ml/L 49B-Thiamine
(0.4 mg/ml); 30 g/L Sucrose; 4 ml/L 2,4-D (0.5 mg/ml);
0.69 g/L L-Proline; 8g/L Sigma Agar; pH 5.8.
Shoot induction medium no selection (630E): 4.05 g/L Rugini
Olive Medium Mix; 30 g/L Sucrose; 6 g/L TC Agar; 1.11 ml/L
BAP (1 mg/ml); 1 ml/L Cefotaxime (250 mg/ml); pH 5.6.
Shoot Induction Auxin media (199A): 4.44 g/L MS modified
basal medium with gamborg vitamins; 4 ml/L 2,4-D (10 mg/ml);
30 g/L Sucrose; 2 g/L Gelzan; pH 7.
Rooting medium (640G): 2.22 g/L MS modified basal medium
with Gamborg vitamins; 20 g/L Sucrose; 0.64 g/L MES buffer;
5 ml/L NaFe EDTA for B5H 100X; 6 g/L TC Agar; pH
5.6; 0.05 ml/L Cefotaxime (250 mg/ml).

### Example 3: The GM-Hbstart3 or the Gm-Ltp3 Promoter

[0174] Controlling Expression of Morphogenic Genes Improves Transformation

[0175] Using the GM-HBSTART3 promoter (SEQ ID NO: 1), the GM-LTP3 promoter (SEQ ID NO:124) or any of the other promoters disclosed herein to drive expression of an Arabidopsis LEC1, LEC2, KN1, STM or LEC1-like (Kwong et al., (2003) The Plant Cell, Vol. 15, 5-18) gene in expression cassettes comprising a fluorescent marker, is found to increase the frequency of somatic embryo formation and the recovery of transgenic T0 plants. Agrobacterium strain LBA4404 is used to transform various vegetative plant organs and their composite tissues including but are not limited to leaf explants, leaf primordia, stipule, cotyledons, cotyledonary nodes, mesocotyl, stem explants, primary roots, lateral secondary roots, root segments, buds, and meristems, including but not limited to apical meristems, root meristems, secondary meristems, axillary meristems, and floral meristems of Pioneer soybean variety PHY21. Four days after the Agrobacterium infection is started, the tissue is washed with sterile culture medium to remove excess bacteria. It is expected that approximately nine days later the tissue is moved to somatic embryo maturation medium, and approximately twenty-two days after that the transgenic somatic embryos are ready for dry-down. At this point, well-formed, mature somatic embryos fluoresce under an epifluorescence stereo-microscope with an appropriate filter set. The somatic embryos that develop are functional and germinate to produce healthy plants in the greenhouse. It is expected that this rapid method of producing somatic embryos and germinating to form plants reduces the typical timeframe from Agrobacterium infection to moving transgenic T0 plants into the greenhouse from four months (for conventional soybean transformation) to approximately two to three months.

### Example 4: Use of the Gm-Hbstart3 or the Gm-Ltp3 Promoter to Control Expression of the Agrobacterium Ipt Gene Stimulates Direct Shoot Formation and Improves Transformation

[0176] Using the GM-HBSTART3 promoter (SEQ ID NO: 1), the GM-LTP3 promoter (SEQ ID NO:124) or any of the other promoters disclosed herein to drive expression of an Agrobacterium IPT gene in expression cassettes comprising a fluorescent marker, is found to increase the frequency of multiple shoot formation and the recovery of transgenic T0 plants. Agrobacterium strain LBA4404 is used to transform various vegetative plant organs and their composite tissues including but are not limited to leaf explants, leaf primordia, stipule, cotyledons, cotyledonary nodes, mesocotyl, stem explants, primary roots, lateral secondary roots, root segments, buds, and meristems, including but not limited to apical meristems, root meristems, secondary meristems, axillary meristems, and floral meristems of Pioneer soybean variety PHY21. Four days after the Agrobacterium infection is started, the tissue is washed with sterile culture medium to remove excess bacteria and moved onto medium that promotes multiple shoot proliferation. It is expected that nine days later the tissue is moved to medium that favors shoot development, and twenty-two after that the transgenic shoots are moved onto medium that promotes rooting. At this point, incipient plantlets fluoresce under an epifluorescence stereo-microscope with an appropriate filter set. Functional plantlets develop rapidly and continue to grow and produce healthy plants in the greenhouse. It is expected that this rapid method of directly forming transgenic plants reduces the typical timeframe from Agrobacterium infection to moving transgenic T0 plants into the greenhouse from four months (for conventional soybean transformation) to approximately two to three months.

### Example 5: The GM-HBSTART3 or the GM-LTP3 Promoter Controlling Expression of the Arabidopsis Monopteros-Delta Gene Stimulates Direct Shoot Formation and Improves Transformation

[0177] Using the GM-HBSTART3 promoter (SEQ ID NO: 1), the GM-LTP3 promoter (SEQ ID NO:124) or any of the other promoters disclosed herein to drive expression of an Arabidopsis MONOPTEROS-DELTA gene in expression cassettes comprising a fluorescent marker, is found to increase the frequency of multiple shoot formation and the recovery of transgenic T0 plants. Agrobacterium strain LBA4404 is used to transform various vegetative plant organs and their composite tissues including but are not limited to leaf explants, leaf primordia, stipule, cotyledons, cotyledonary nodes, mesocotyl, stem explants, primary roots, lateral secondary roots, root segments, buds, and meristems, including but not limited to apical meristems, root meristems, secondary meristems, axillary meristems, and floral meristems of Pioneer soybean variety PHY21. Four days after the Agrobacterium infection is started, the tissue is washed with sterile culture medium to remove excess bacteria and moved onto medium that promotes multiple shoot proliferation. It is expected that nine days later the tissue is moved to medium that favors shoot development, and twenty-two days after that the transgenic shoots are moved onto medium that promotes rooting. At this point, incipient plantlets fluoresce under an epifluorescence stereo-microscope with an appropriate filter set. Functional plantlets develop rapidly and continue to grow and produce healthy plants in the greenhouse. It is expected that this rapid method of directly forming transgenic plants reduces the typical timeframe from Agrobacterium infection to moving transgenic T0 plants into the greenhouse from four months (for conventional soybean transformation) to approximately two to three months.

### Example 6: The GM-HBSTART3 or the GM-LTP3 Promoter Controlling Expression of Growth Enhancing Genes Improves Transformation

[0178] Using the GM-HBSTART3 promoter (SEQ ID NO: 1), the GM-LTP3 promoter (SEQ ID NO:124) or any of the other promoters disclosed herein to drive expression of an Agrobacterium AV-6B gene, an Agrobacterium IAA-h gene, an Agrobacterium IAA-m gene, an Arabidopsis SERK or an Arabidopsis AGL15 gene in expression cassettes comprising a fluorescent marker, is found to increase the frequency of somatic embryo formation and the recovery of transgenic T0 plants. Agrobacterium strain LBA4404 is used to transform various vegetative plant organs and their composite tissues including but are not limited to leaf explants, leaf primordia, stipule, cotyledons, cotyledonary nodes, mesocotyl, stem explants, primary roots, lateral secondary roots, root segments, buds, and meristems, including but not limited to apical meristems, root meristems, secondary meristems, axillary meristems, and floral meristems of Pioneer soybean variety PHY21. Four days after the Agrobacterium infection is started, the tissue is washed with sterile culture medium to remove excess bacteria. It is expected that nine days later the tissue is moved to somatic embryo maturation medium, and twenty-two days after that the transgenic somatic embryos are ready for dry-down. At this point, well-formed, mature somatic embryos fluoresce under an epifluorescence stereo-microscope with an appropriate filter set. The somatic embryos that develop are functional and germinate to produce healthy plants in the greenhouse. It is expected that this rapid method of producing somatic embryos and germinating to form plants reduces the typical timeframe from Agrobacterium infection to moving transgenic T0 plants into the greenhouse from four months (for conventional soybean transformation) to approximately two to three months.

### Example 7: Use of Viral Enhancer Elements in Conjunction with the GM-HBSTART3 Promoter to Drive Expression of Wus Results in Further Improvement of Soy Transformation

[0179] Relative to using the GM-HBSTART3 promoter (SEQ ID NO: 1), the GM-LTP3 promoter (SEQ ID NO:124) or any of the other promoters disclosed herein alone, use of a viral enhancer element such as the 35S enhancer adjacent to the GM-HBSTART3 promoter (SEQ ID NO: 1), the GM-LTP3 promoter (SEQ ID NO:124) or any of the other promoters disclosed herein to drive expression of WUS in expression cassettes comprising a fluorescent marker, results in a further increase in the frequency of somatic embryo formation and the frequency of somatic embryo maturation, resulting in an overall increase in the recovery of transgenic T0 plants. Agrobacterium strain LBA4404 is used to transform various vegetative plant organs and their composite tissues including but are not limited to leaf explants, leaf primordia, stipule, cotyledons, cotyledonary nodes, mesocotyl, stem explants, primary roots, lateral secondary roots, root segments, buds, and meristems, including but not limited to apical meristems, root meristems, secondary meristems, axillary meristems, and floral meristems of Pioneer soybean variety PHY21. Four days after the Agrobacterium infection is started, the tissue is washed with sterile culture medium to remove excess bacteria. Nine days later the tissue is moved to somatic embryo maturation medium, and twenty-two days after that transgenic somatic embryos are ready for dry-down. At this point, well-formed, mature somatic embryos fluoresce under an epifluorescence stereo-microscope with an appropriate filter set. The somatic embryos that develop are functional and germinate to produce healthy plants in the greenhouse. This rapid method of producing somatic embryos and germinating to form plants reduces the typical timeframe from Agrobacterium infection to moving transgenic T0 plants into the greenhouse from four months (for conventional soybean transformation) to approximately two to three months.

[0180] Other enhancer elements are tested in a similar fashion and are shown to also result in increased transformation relative to using the GM-HBSTART3 promoter (SEQ ID NO: 1), the GM-LTP3 promoter (SEQ ID NO:124) or any of the other promoters disclosed herein alone. These enhancers include the viral enhancers such as the Cauliflower Mosaic Virus 35S and the Mirabilis Mosaic Virus 2×MMV as well as endogenous plant enhancer elements.

### Example 8: Orthologs of the Arabidopsis Wus Gene Function in Brassica to Stimulate Somatic Embryo Formation

[0181] The following particle gun transformation treatments are compared. All particle gun transformation treatments contain plasmid QC318 (SEQ ID NO: 117) with GM-EF1 A PRO::GM-EF1 A INTRON1::ZS-YELLOW::NOS TERM+GM-SAMS PRO::GM-SAMS INTRON1::GM-ALS::GM-ALS TERM. The treatments include 1) a control with no addition genes, 2) pVER9662 (SEQ ID NO: 118) with the AT-UBI PRO driving expression of the Arabidopsis WUS gene, 3) UBIGMWUS (SEQ ID NO: 119) with the AT-UBI PRO driving expression of the Glycine max WUS gene, 4) UBIMTWUS (SEQ ID NO: 120) with the AT-UBI PRO driving expression of the Medicago truncatula WUS gene, 5) UBILJWUS (SEQ ID NO: 121) with the AT-UBI PRO driving expression of the Lotus japonica WUS gene, 6) UBIPVWUS (SEQ ID NO: 122) with the AT-UBI PRO driving expression of the Phaseolus vulgaris WUS gene, and 7) UBIPHWUS (SEQ ID NO: 123) with the AT-UBI PRO driving expression of the petunia WUS gene.

[0182] Various vegetative plant organs and their composite tissues including but are not limited to leaf explants, leaf primordia, stipule, cotyledons, cotyledonary nodes, mesocotyl, stem explants, primary roots, lateral secondary roots, root segments, buds, and meristems, including but not limited to apical meristems, root meristems, secondary meristems, axillary meristems, and floral meristems of Brassica are isolated for transformation with the particle gun. A mixture of two plasmids are co-introduced, the first containing an expression cassette consisting of the AT-UBI PRO driving expression of the cDNA sequence for each of the WUS orthologs (pVER9662 (SEQ ID NO: 118), UBIGMWUS (SEQ ID NO: 119), UBIMTWUS (SEQ ID NO: 120), UBILJWUS (SEQ ID NO: 121), UBIPVWUS (SEQ ID NO: 122), and UBIPHWUS (SEQ ID NO: 123) plus an expression cassette for ZS-YELLOW (QC318 (SEQ ID NO: 117)). The explants are cultured for two weeks. At two weeks, the number of fluorescing globular somatic embryos are counted and tabulated for each treatment.

[0183] Two weeks after particle gun transformation, fluorescent globular somatic embryos are rarely observed on the bombarded control vegetative plant organs and their composite tissues, including immature cotyledons, split seeds, isolated embryonic axes, mature cotyledonary nodes, hypocotyl, epicotyl, or leaf tissue of Brassica, while for all the other treatments (containing WUS genes from different dicot species driven by the AT-UBI promoter), numerous fluorescent somatic embryos are observed on bombarded vegetative plant organs and their composite tissues including but are not limited to leaf explants, leaf primordia, stipule, cotyledons, cotyledonary nodes, mesocotyl, stem explants, primary roots, lateral secondary roots, root segments, buds, and meristems, including but not limited to apical meristems, root meristems, secondary meristems, axillary meristems, and floral meristems of Brassica.

### Example 9: Orthologs of the Arabidopsis Wus Gene Function in Sunflower to Stimulate Somatic Embryo Formation

[0184] The following particle gun transformation treatments are compared. All particle gun transformation treatments contain plasmid QC318 (SEQ ID NO: 117) with GM-EF1 A PRO::GM-EF1 A INTRON1::ZS-YELLOW::NOS TERM+GM-SAMS PRO::GM-SAMS INTRON1::GM-ALS::GM-ALS TERM. The treatments include 1) a control with no addition genes, 2) pVER9662 (SEQ ID NO: 118) with the AT-UBI PRO driving expression of the Arabidopsis WUS gene, 3) UBIGMWUS (SEQ ID NO: 119) with the AT-UBI PRO driving expression of the Glycine max WUS gene, 4) UBIMTWUS (SEQ ID NO: 120) with the AT-UBI PRO driving expression of the Medicago truncatula WUS gene, 5) UBILJWUS (SEQ ID NO: 121) with the AT-UBI PRO driving expression of the Lotus japonica WUS gene, 6) UBIPVWUS (SEQ ID NO: 122) with the AT-UBI PRO driving expression of the Phaseolus vulgaris WUS gene, and 7) UBIPHWUS (SEQ ID NO: 123) with the AT-UBI PRO driving expression of the petunia WUS gene.

[0185] Various vegetative plant organs and their composite tissues including but are not limited to leaf explants, leaf primordia, stipule, cotyledons, cotyledonary nodes, mesocotyl, stem explants, primary roots, lateral secondary roots, root segments, buds, and meristems, including but not limited to apical meristems, root meristems, secondary meristems, axillary meristems, and floral meristems of sunflower are isolated for transformation with the particle gun. A mixture of two plasmids are co-introduced, the first containing an expression cassette consisting of the AT-UBI PRO driving expression of the cDNA sequence for each of the WUS orthologs (pVER9662 (SEQ ID NO: 118), UBIGMWUS (SEQ ID NO: 119), UBIMTWUS (SEQ ID NO: 120), UBILJWUS (SEQ ID NO: 121), UBIPVWUS (SEQ ID NO: 122), and UBIPHWUS (SEQ ID NO: 123)) plus an expression cassette for ZS-YELLOW (QC318 (SEQ ID NO: 117)). The explants are cultured for two weeks. At two weeks, the number of fluorescing globular somatic embryos are counted and tabulated for each treatment.

[0186] Two weeks after particle gun transformation, fluorescent globular somatic embryos are rarely observed on the bombarded control vegetative plant organs and their composite tissues of sunflower, while for all the other treatments (containing WUS genes from different dicot species driven by the AT-UBI promoter), numerous fluorescent somatic embryos are observed on bombarded vegetative plant organs and their composite tissues including but are not limited to leaf explants, leaf primordia, stipule, cotyledons, cotyledonary nodes, mesocotyl, stem explants, primary roots, lateral secondary roots, root segments, buds, and meristems, including but not limited to apical meristems, root meristems, secondary meristems, axillary meristems, and floral meristems of sunflower.

### Example 10: Use of Wus Orthologs from Four Different Species to Stimulate Direct Shoot Formation after Agrobacterium-Mediated Transformation of Soybean Leaf Segments

[0187] The Agrobacterium strain LBA4404 THY-containing the poplar WUS (RV026520 (SEQ ID NO: 164) (POPTR-WUS)), the Amaranthus WUS (RV026533 (SEQ ID NO: 165) (AMAHY-WUS)), the WUS gene from apple (RV026531 (SEQ ID NO: 157) (MALDO-WUS)) or the WUS gene from Gnetum (RV026522 (SEQ ID NO: 154) (GNEGN-WUS)) was used to transform segments of tissue cut from in vitro-grown, sterile, immature leaves of Pioneer soybean variety PHY21. Agrobacterium strain LBA4404 THY-containing the vectors for the genes listed above and listed in Table 3 were used for the infections, and all bacterial cultures were adjusted to OD 0.5 for infection. All vectors contained the selectable marker gene SPCN (spectinomycin). Leaf explants were infected for 30 min and were placed on co-cultivation medium for three days at 21° C. in dark. After co-cultivation, explants were transferred to shoot regeneration medium for 3 to 4 weeks. Elongated shoots were transferred to rooting media. For the control treatment (transforming with RV022814 (SEQ ID NO: 168) (NO WUS)) which contained the SPCN and ZS-YELLOW1 N1 expression cassettes, no direct shoot formation from leaf segments was observed. However, when transformations were performed which introduced T-DNAs containing the three expression cassettes (WUS, SPCN and ZS-YELLOW1 N1) green healthy shoots were produced from the poplar WUS (RV026520 (SEQ ID NO: 164) (POPTR-WUS)), the Amaranthus WUS (RV026533 (SEQ ID NO: 165) (AMAHY-WUS)), the Gnetum WUS (RV026522 (SEQ ID NO: 154) (GNEGN-WUS)), and the apple WUS (RV026531 (SEQ ID NO: 157) (MALDO-WUS)) (at frequencies of 23.6%, 38.4%, 52% and 52.5%, respectively).

### Example 11: Regeneration from Soy Leaf and Stem Explants Infected with Vectors Containing a Developmental Gene and Spcn Selectable Marker Gene

[0188] Soybean lines such as elite lines can be used in this method. Leaf and stem explants of 93Y21 were harvested. Leaves were cut into pieces of uniform size, approximately 30-60 millimeters. Stem internodes were cut into sections of about 0.3 to 0.8 cm in length. Agrobacterium strain LBA4404 THY-containing the vectors listed in Table 6 were used for the infections, and all bacterial cultures were adjusted to OD 0.5 for infection. All vectors contained the selectable marker gene SPCN (spectinomycin). The leaf and stem internode explants were infected for 30 min and were placed on co-cultivation medium for three days at 21° C. in dark. After co-cultivation, explants were transferred to shoot regeneration medium. Infection frequency was evaluated by screening the transient expression of the selectable marker gene at 5 and 20 days after transformation. Shoot regeneration was observed about 30 days after infection (Table 6). Transgenic shoots were evaluated for the presence of the SPCN marker gene. As shown in Table 6 expressing WUS genes from phylogenetically divergent dicot or gymnosperm species stimulated direct shoot formation from either soy leaf or stem explants. Green healthy shoots were produced from either soy leaf or stem explants when transformed with T-DNAs containing the Amaranthus WUS (RV026533 (SEQ ID NO: 165) (AMAHY-WUS)), the poplar WUS (RV026520 (SEQ ID NO: 164) (POPTR-WUS)), the apple WUS (RV026531 (SEQ ID NO: 157) (MALDO-WUS)), and the Gnetum WUS (RV026522 (SEQ ID NO: 154) (GNEGN-WUS)) (at frequencies of 20%, 15%, 5% and 5.5%, respectively).

[0189] As shown in Table 6 no shoot induction was observed when Shoot Induction 199 A media was used. These results suggest that improvements in the shoot induction media formulation may further improve the recovery of green healthy shoots.

TABLE 6
Shoot regeneration from infected leaf and stem explants of elite soybean

| | | # Explant | | Marker gene expression | | | | | | | |
|---|---|---|---|---|---|---|---|---|---|---|---|
| | Treatment | used | | at 1 month | | | | Shoots induced | | | |
| Construct | Media | Stems | Leaves | Stems | % | Leaves | % | From leaf | % | From stem | % |
| RV026523 | 630E | 16 | 0 | 4 | 25 | 0 | 0 | 0 | 0 | 0 | 0 |
| (SEQ ID | | | | | | | | | | | |
| NO: 159) | | | | | | | | | | | |
| (KALFE- | | | | | | | | | | | |
| WUS) | | | | | | | | | | | |
| RV026524 | 630E | 10 | 10 | 7 | 70 | 9 | 90 | 0 | 0 | 0 | 0 |
| (SEQ ID | | | | | | | | | | | |
| NO: 158) | | | | | | | | | | | |
| (MANES- | | | | | | | | | | | |
| WUS) | | | | | | | | | | | |
| RV026533 | 630E | 5 | 8 | 1 | 20 | 4 | 50 | 0 | 0 | 1 | 20 |
| (SEQ ID | | | | | | | | | | | |
| NO: 165) | | | | | | | | | | | |
| (AMAHY- | | | | | | | | | | | |
| WUS) | | | | | | | | | | | |
| RV026530 | 630E | 10 | 10 | 1 | 10 | 5 | 50 | 0 | 0 | 0 | 0 |
| (SEQ ID | | | | | | | | | | | |
| NO: 160) | | | | | | | | | | | |
| (GOSHI- | | | | | | | | | | | |
| WUS) | | | | | | | | | | | |
| RV026527 | | | | | | | | | | | |
| (SEQ ID | 630E | 10 | 0 | 0 | 0 | 0 | 0 | 0 | 0 | 0 | 0 |
| NO: 161) | | | | | | | | | | | |
| (ZOSMA- | | | | | | | | | | | |
| WUS) | | | | | | | | | | | |
| RV021090 | 630E | 13 | 0 | 1 | 8 | 0 | 0 | 0 | 0 | 0 | 0 |
| (SEQ ID | | | | | | | | | | | |
| NO: 153) | | | | | | | | | | | |
| (HA-WUS) | | | | | | | | | | | |
| (+Control) | | | | | | | | | | | |
| RV026520 | 630E | 18 | 20 | 1 | 6 | 8 | 40 | 3 | 15 | 0 | 0 |
| (SEQ ID | | | | | | | | | | | |
| NO: 164) | | | | | | | | | | | |
| (POPTR- | | | | | | | | | | | |
| WUS) | | | | | | | | | | | |
| RV026531 | 630E | 20 | 20 | 7 | 35 | 14 | 70 | 1 | 5 | 0 | 0 |
| (SEQ ID | | | | | | | | | | | |
| NO: 157) | | | | | | | | | | | |
| (MALDO- | | | | | | | | | | | |
| WUS) | | | | | | | | | | | |
| RV026534 | 630E | 15 | 15 | 4 | 27 | 1 | 7 | 0 | 0 | 0 | 0 |
| (SEQ ID | | | | | | | | | | | |
| NO: 156) | | | | | | | | | | | |
| (PETHY- | | | | | | | | | | | |
| WUS) | | | | | | | | | | | |
| RV026525 | 630E | 20 | 20 | 1 | 5 | 8 | 40 | 0 | 0 | 0 | 0 |
| (SEQ ID | | | | | | | | | | | |
| NO: 167) | | | | | | | | | | | |
| (PINTA- | | | | | | | | | | | |
| WUS) | | | | | | | | | | | |
| RV022814 | 630E | 20 | 20 | 6 | 30 | 9 | 45 | 0 | 0 | 0 | 0 |
| (SEQ ID | | | | | | | | | | | |
| NO: 168) | | | | | | | | | | | |
| (NO WUS) | | | | | | | | | | | |
| (−Control) | | | | | | | | | | | |
| RV026529 | | | | | | | | | | | |
| (SEQ ID | 630E | 20 | 20 | 1 | 5 | 0 | 0 | 0 | 0 | 0 | 0 |
| NO: 162) | | | | | | | | | | | |
| (AMBTR- | | | | | | | | | | | |
| WUS) | | | | | | | | | | | |
| RV026522 | 630E | 18 | 19 | 6 | 33 | 15 | 79 | 0 | 0 | 1 | 5.5 |
| (SEQ ID | | | | | | | | | | | |
| NO: 154) | | | | | | | | | | | |
| (GNEGN- | | | | | | | | | | | |
| WUS) | | | | | | | | | | | |
| RV026528 | 630E | 18 | 20 | 12 | 67 | 9 | 45 | 0 | 0 | 0 | 0 |
| (SEQ ID | | | | | | | | | | | |
| NO: 163) | | | | | | | | | | | |
| (AQUCO- | | | | | | | | | | | |
| WUS) | | | | | | | | | | | |
| RV026523 | 199A | 16 | 0 | 0 | 0 | 0 | 0 | 0 | 0 | 0 | 0 |
| (SEQ ID | | | | | | | | | | | |
| NO: 159) | | | | | | | | | | | |
| (KALFE- | | | | | | | | | | | |
| WUS) | | | | | | | | | | | |
| RV026524 | 199A | 10 | 10 | 0 | 0 | 4 | 40 | 0 | 0 | 0 | 0 |
| (SEQ ID | | | | | | | | | | | |
| NO: 158) | | | | | | | | | | | |
| (MANES- | | | | | | | | | | | |
| WUS) | | | | | | | | | | | |
| RV026533 | 199A | 5 | 8 | 0 | 0 | 0 | 0 | 0 | 0 | 0 | 0 |
| (SEQ ID | | | | | | | | | | | |
| NO: 165) | | | | | | | | | | | |
| (AMAHY- | | | | | | | | | | | |
| WUS) | | | | | | | | | | | |
| RV026530 | | | | | | | | | | | |
| (SEQ ID | 199A | 10 | 10 | 0 | 0 | 2 | 20 | 0 | 0 | 0 | 0 |
| NO: 160) | | | | | | | | | | | |
| (GOSHI- | | | | | | | | | | | |
| WUS) | | | | | | | | | | | |
| RV026527 | 199A | 10 | 0 | 0 | 0 | 0 | 0 | 0 | 0 | 0 | 0 |
| (SEQ ID | | | | | | | | | | | |
| NO: 161) | | | | | | | | | | | |
| (ZOSMA- | | | | | | | | | | | |
| WUS) | | | | | | | | | | | |
| RV021090 | 199A | 13 | 0 | 0 | 0 | 0 | 0 | 0 | 0 | 0 | 0 |
| (SEQ ID | | | | | | | | | | | |
| NO: 153) | | | | | | | | | | | |
| (HA-WUS) | | | | | | | | | | | |
| (+Control) | | | | | | | | | | | |
| RV026520 | 199A | 18 | 20 | 0 | 0 | 0 | 0 | 0 | 0 | 0 | 0 |
| (SEQ ID | | | | | | | | | | | |
| NO: 164) | | | | | | | | | | | |
| (POPTR- | | | | | | | | | | | |
| WUS) | | | | | | | | | | | |
| RV026531 | 199A | 20 | 20 | 0 | 0 | 2 | 10 | 0 | 0 | 0 | 0 |
| (SEQ ID | | | | | | | | | | | |
| NO: 157) | | | | | | | | | | | |
| (MALDO- | | | | | | | | | | | |
| WUS) | | | | | | | | | | | |
| RV026534 | 199A | 15 | 15 | 0 | 0 | 1 | 7 | 0 | 0 | 0 | 0 |
| (SEQ ID | | | | | | | | | | | |
| NO: 156) | | | | | | | | | | | |
| (PETHY- | | | | | | | | | | | |
| WUS) | | | | | | | | | | | |
| RV026525 | 199A | 20 | 20 | 0 | 0 | 0 | 0 | 0 | 0 | 0 | 0 |
| (SEQ ID | | | | | | | | | | | |
| NO: 167) | | | | | | | | | | | |
| (PINTA- | | | | | | | | | | | |
| WUS) | | | | | | | | | | | |
| RV022814 | 199A | 20 | 20 | 0 | 0 | 0 | 0 | 0 | 0 | 0 | 0 |
| (SEQ ID | | | | | | | | | | | |
| NO: 168) | | | | | | | | | | | |
| (NO WUS) | | | | | | | | | | | |
| (−Control) | | | | | | | | | | | |
| RV026529 | 199A | 20 | 20 | 0 | 0 | 0 | 0 | 0 | 0 | 0 | 0 |
| (SEQ ID | | | | | | | | | | | |
| NO: 162) | | | | | | | | | | | |
| (AMBTR- | | | | | | | | | | | |
| WUS) | | | | | | | | | | | |
| RV026522 | 199A | 18 | 19 | 0 | 0 | 3 | 16 | 0 | 0 | 0 | 0 |
| (SEQ ID | | | | | | | | | | | |
| NO: 154) | | | | | | | | | | | |
| (GNEGN- | | | | | | | | | | | |
| WUS) | | | | | | | | | | | |
| RV026528 | | | | | | | | | | | |
| (SEQ ID | 199A | 18 | 20 | 0 | 0 | 0 | 0 | 0 | 0 | 0 | 0 |
| NO: 163) | | | | | | | | | | | |
| (AQUCO- | | | | | | | | | | | |
| WUS) | | | | | | | | | | | |

### Example 12: Orthologs of the Arabidopsis Wus Gene Stimulate Morphogenic Growth in Brassica Leaf

[0190] WUS genes from 12 different dicotyledonous species, 2 gymnosperms, and one monocot species were tested for efficacy by assessing their ability to stimulate growth of transgenic green shoot responses in Brassica while undergoing selection on spectinomycin-containing medium. For all treatments containing a WUS expression cassette, the configuration of the T-DNA was identical with the exception of the WUS gene used in the construct. The T-DNA configuration was RB+CAMV35S PRO::WUS::OS-T28 TERM+GM-UBQ PRO::GM-UBQ SUTR::GM-UBQ INTRON1::ZS-YELLOW1 N1::NOS TERM+AT-UBIQ10 PRO::AT-UBIQ10 SUTR::AT-UBIQ10 INTRON1::CTP::SPCN::UBQ14 TERM+GM-EF1 A2 PRO::GM-EF1 A2 5′ UTR::GM-EF1 A2 INTRON1::DS-RED2::UBQ TERM+LB with the variable WUS gene in bold and italics.

[0191] Seeds of Brassica napus were surface sterilized in a 50% Clorox solution and germinated on solid medium containing MS basal salts and vitamins. The seedlings were grown at 28° C. in light, and leaves were collected. The leaves were transferred into 100×25 mm petri plates containing 10 ml of 20 A medium (Table 7) with 200 mM acetosyringone and then sliced into 3-5 mm long sections. After slicing, 40μ1 of Agrobacterium solution (Agrobacterium strain LBA4404 THY-at an OD₅₅₀ of 0.50) containing the expression cassettes described above were added to the plates, and the petri plates containing the leaf/Agrobacterium mixture were either vacuum infiltrated or wounded. The leaf sections placed into a vacuum were exposed to 15 PSI for 1 minute. Wounded leaf sections were pierced 10 times each with a needle. The wounding and vacuum infiltrated plates were moved into dim light and 21° C. for 3 days of co-cultivation.

[0192] After co-cultivation, the leaf sections were removed from the Agrobacterium solution, and lightly blotted onto sterile filter paper before placing onto 70 D media (Table 7) and moved to the light room (16 hr. photoperiod at 60-100 μE/m²/s). The leaf sections remained on 70 D media for one week, and then transferred to 70 A media with no spectinomycin. Shoots that emerged were moved onto 70 C shoot elongation media (Table 7) and placed back into the light room (16 hr. photoperiod at 60-100 μE/m²/s) for one month. Seven weeks after initial transformation, shoots were counted.

TABLE 7
Media

Infection and co-cultivation medium (20A): MS salts and vitamins;
0.1 g/L myo-inositol; 0.5 g/L MES buffer; 0.1 mg/L a-NAA;
1 mg/L BAP; 10 ug/L gibberellic acid; 50 mg/L thymidine; pH 5.5.
First culture medium (70D): MS salts and vitamins; 0.1 g/L
myo-inositol; 0.5 g/L MES buffer; 0.1 ml/L a-NAA (1.0 mg/ml);
1 ml/L BAP (1.0 mg/ml); 40 mg/L adenine hemisulfate salt;
20 g/L sucrose; 0.5 g/L PVP40; 1.0 ml/L silver nitrate (2.0 mg/ml);
10 ml/L carbenicillin (50.0 mg/ml); 5 g/L TC agar; pH 5.7.
First Selection medium (70A): MS salts and vitamins; 0.1 g/l
myo-inositol; 0.5 g/l MES buffer; 0.1 mg/l a-NAA; 1 mg/l BAP;
10 ug/l gibberellic acid; 40 mg/l adenine hemisulfate; 20 g/l
sucrose; 0.5 g/l PVP40; 2 mg/l silver nitrate; 0.5 g/l carbenicillin;
5 mg/l spectinomycin; 5 g/l TC agar; pH 5.7.
Second Selection medium (70B): MS salts and vitamins; 0.1 g/l
myo-inositol; 0.5 g/l MES buffer; 0.1 mg/l a-NAA; 1 mg/l BAP;
10 ug/l gibberellic acid; 40 mg/l adenine hemisulfate; 20 g/l
sucrose; 0.5 g/l PVP40; 2 mg/l silver nitrate; 0.5 g/l carbenicillin;
10 mg/l spectinomycin; 5 g/l TC agar; pH 5.7.
Second culture medium (70A no Spec): MS salts and vitamins;
0.1 g/l myo-inositol; 0.5 g/l MES buffer; 0.1 mg/l a-NAA; 1 mg/l
BAP; 10 ug/l gibberellic acid; 40 mg/l adenine hemisulfate; 20
g/l sucrose; 0.5 g/l PVP40; 2 mg/l silver nitrate; 0.5 g/l carbenicillin;
5 g/l TC agar; pH 5.7.
Regeneration Medium (70C): MS salts and vitamins; 0.1 g/l
myo-inositol; 0.5 g/l MES buffer; 2.5 ug/l BAP; 40 mg/l adenine
hemisulfate; 20 g/l sucrose; 0.5 g/l PVP40; 0.5 g/l carbenicillin;
10 mg/l spectinomycin; 5 g/l TC agar; pH 5.7.
Rooting Medium (90A): MS salts and vitamins; 0.5 mg/l IBA;
pH 5.7.

[0193] As shown in Table 8 and Table 9, expressing WUS genes from phylogenetically divergent dicot, gymnosperm, or monocot species stimulated direct shoot formation in canola leaf sections. This stimulation of shoot development and the ability to recover spectinomycin-resistant shoots was variable, depending on the source of the WUS gene. For pine (RV026525 (SEQ ID NO: 167) (PINTA-WUS)), cucumber (RV026521 (SEQ ID NO: 166) (CUCSA-WUS)), Amborella (RV026529 (SEQ ID NO: 162) (AMBTR-WUS)), poplar (RV026520 (SEQ ID NO: 164) (POPTR-WUS)), and tomato (RV026592 (SEQ ID NO: 196) (SL-WUS)) this stimulation of transgenic shoots was the same as that seen in the negative control treatment. De novo shoot regeneration ranged for WUS genes from other species up to 29% for cassava (RV026524 (SEQ ID NO: 158) (MANES-WUS)), 25% for both apple (RV026531 (SEQ ID NO: 157) (MALDO-WUS)) and columbine (RV026528 (SEQ ID NO: 163) (AQUCO-WUS)), 21% for both grape (RV026526 (SEQ ID NO: 155) (VITVI-WUS)) and Gnetum gnemon (a gymnosperm) (RV026522 (SEQ ID NO: 154) (GNEGN-WUS)), 17% for petunia (RV026534 (SEQ ID NO: 156) (PETHY-WUS)), 8% for eelgrass (a monocot) (RV026527 (SEQ ID NO: 161) (ZOSMA-WUS)), and 4% for Kalanchoe (RV026523 (SEQ ID NO: 159) (KALFE-WUS)) as shown in Table 8 and Table 9 below.

TABLE 8
Efficacy* of WUS genes from various species in Brassica
leaf tissue

| | Leaf Vacuum Infiltration | | |
|---|---|---|---|
| | | Transgenic | Transgenic |
| Treatment | Leaf Sections | Shoots | Shoots % |
| RV026524 | 14 | 3 | 21% |
| (SEQ ID NO: 158) | | | |
| (MANES-WUS) | | | |
| RV026531 | 12 | 6 | 50% |
| (SEQ ID NO: 157) | | | |
| (MALDO-WUS) | | | |
| RV026528 | 0 | 0 | NA |
| (SEQ ID NO: 163) | | | |
| (AQUCO-WUS) | | | |
| RV026522 | 12 | 6 | 50% |
| (SEQ ID NO: 154) | | | |
| (GNEGN-WUS) | | | |
| RV026526 | 12 | 5 | 42% |
| (SEQ ID NO: 155) | | | |
| (VITVI-WUS) | | | |
| RV026534 | 12 | 4 | 33% |
| (SEQ ID NO: 156) | | | |
| (PETHY-WUS) | | | |
| RV026530 | 12 | 0 | 0% |
| (SEQ ID NO: 160) | | | |
| (GOSHI-WUS) | | | |
| RV026527 | 12 | 0 | 0% |
| (SEQ ID NO: 161) | | | |
| (ZOSMA-WUS) | | | |
| RV026523 | 12 | 1 | 8% |
| (SEQ ID NO: 159) | | | |
| (KALFE-WUS) | | | |
| RV026525 | 12 | 0 | 0% |
| (SEQ ID NO: 167) | | | |
| (PINTA-WUS) | | | |
| RV026521 | 12 | 0 | 0% |
| (SEQ ID NO: 166) | | | |
| (CUCSA-WUS) | | | |
| RV026529 | 12 | 0 | 0% |
| (SEQ ID NO: 162) | | | |
| (AMBTR-WUS) | | | |
| RV026520 | 12 | 0 | 0% |
| (SEQ ID NO: 164) | | | |
| (POPTR-WUS) | | | |
| RV026592 | 12 | 0 | 0% |
| (SEQ ID NO: 196) | | | |
| (SL-WUS) | | | |
| RV026533 | 12 | 0 | 0% |
| (SEQ ID NO: 165) | | | |
| (AMAHY-WUS) | | | |
| RV022814 | 12 | 0 | 0% |
| (SEQ ID NO: 168) | | | |
| (NO WUS) | | | |
| (- Control) | | | |

*Efficacy of WUS genes from various species, as measured by the percentage of starting leaf section explants that produced green shoots from the section explants (on spectinomycin selection) at 50 days after Agrobacterium infection, wherein the starting leaf section explants were transformed by an Agrobacterium with a T-DNA containing a WUS gene as described above.

TABLE 9
Efficacy* of WUS genes from various species in Brassica leaf tissue

| | | | | Total |
|---|---|---|---|---|
| | Leaf Wounded | | | (Table 8 & 9) |
| | | Transgenic | Transgenic | Transgenic |
| Treatment | Leaf Sections | shoots | Shoots % | shoots % |
| RV026524 | 14 | 5 | 35.7% | 29% |
| (SEQ ID | | | | |
| NO: 158) | | | | |
| (MANES- | | | | |
| WUS) | | | | |
| RV026531 | 15 | 1 | 6.7% | 26% |
| (SEQ ID | | | | |
| NO: 157) | | | | |
| (MALDO- | | | | |
| WUS) | | | | |
| RV026528 | 12 | 3 | 25.0% | 25% |
| (SEQ ID | | | | |
| NO: 163) | | | | |
| (AQUCO- | | | | |
| WUS) | | | | |
| RV026522 | 17 | 0 | 0.0% | 21% |
| (SEQ ID | | | | |
| NO: 154) | | | | |
| (GNEGN- | | | | |
| WUS) | | | | |
| RV026526 | 12 | 0 | 0.0% | 21% |
| (SEQ ID | | | | |
| NO: 155) | | | | |
| (VITVI- | | | | |
| WUS) | | | | |
| RV026534 | 12 | 0 | 0.0% | 17% |
| (SEQ ID | | | | |
| NO: 156) | | | | |
| (PETHY- | | | | |
| WUS) | | | | |
| RV026530 | 12 | 3 | 25.0% | 13% |
| (SEQ ID | | | | |
| NO: 160) | | | | |
| (GOSHI- | | | | |
| WUS) | | | | |
| RV026527 | 12 | 2 | 16.7% | 8% |
| (SEQ ID | | | | |
| NO: 161) | | | | |
| (ZOSMA- | | | | |
| WUS) | | | | |
| RV026523 | 12 | 0 | 0.0% | 4% |
| (SEQ ID | | | | |
| NO: 159) | | | | |
| (KALFE- | | | | |
| WUS) | | | | |
| RV026525 | 11 | 0 | 0.0% | 0% |
| (SEQ ID | | | | |
| NO: 167) | | | | |
| (PINTA- | | | | |
| WUS) | | | | |
| RV026521 | 12 | 0 | 0.0% | 0% |
| (SEQ ID | | | | |
| NO: 166) | | | | |
| (CUCSA- | | | | |
| WUS) | | | | |
| RV026529 | 12 | 0 | 0.0% | 0% |
| (SEQ ID | | | | |
| NO: 162) | | | | |
| (AMBTR- | | | | |
| WUS) | | | | |
| RV026520 | 13 | 0 | 0.0% | 0% |
| (SEQ ID | | | | |
| NO: 164) | | | | |
| (POPTR- | | | | |
| WUS) | | | | |
| RV026592 | 11 | 0 | 0.0% | 0% |
| (SEQ ID | | | | |
| NO: 196) | | | | |
| (SL-WUS) | | | | |
| RV026533 | | | | |
| (SEQ ID | | | | |
| NO: 165) | 10 | 0 | 0.0% | 0% |
| (AMAHY- | | | | |
| WUS) | | | | |
| RV022814 | 12 | 0 | 0.0% | 0% |
| (SEQ ID | | | | |
| NO: 168) | | | | |
| (NO | | | | |
| WUS) | | | | |
| (−Control) | | | | |

*Efficacy of WUS genes from various species, as measured by the percentage of starting leaf section explants that produced green shoots from the section explants (on spectinomycin selection) at 50 days after Agrobacterium infection, wherein the starting leaf section explants were transformed by an Agrobacterium with a T-DNA containing a WUS gene as described above.

### Example 13: Orthologs of the Arabidopsis Wus Gene Stimulate Morphogenic Growth in Cowpea Leaves

[0194] WUS genes from twelve (12) different dicotyledonous species, two (2) gymnosperms, and one (1) monocot species were tested for efficacy by assessing their ability to stimulate growth of transgenic green shoot responses in cowpea leaves. For all treatments containing a WUS expression cassette, the configuration of the T-DNA was identical except for the WUS gene used in the construct. The T-DNA configuration was RB+CAMV35S PRO::WUS::OS-T28 TERM+GM-UBQ PRO::GM-UBQ SUTR::GM-UBQ INTRON1::ZS-YELLOW1 N1::NOS TERM+AT-UBIQ10 PRO::AT-UBIQ10 5UTR::AT-UBIQ10 INTRON1::CTP::SPCN::UBQ14 TERM+GM-EF1 A2 PRO::GM-EF1 A2 5′ UTR::GM-EF1 A2 INTRON1::DS-RED2::UBQ TERM+LB with the variable WUS gene in bold and italics.

[0195] Seeds of Vigna unguiculata IT86 D-1010 were sterilized with chlorine gas and germinated on solid medium containing MS basal salts and vitamins. The seedlings were grown at 28° C. in light and leaves were collected. The leaf tissue was transferred into 100×25 mm petri plates containing 10mls of 20 A medium (Table 10) with 200 mM acetosyringone and sliced into 3-5 mm long sections. After slicing, the 20 A solution was removed from each petri plate and replaced with 5 ml of the different Agrobacterium solutions (Agrobacterium strain LBA4404 THY-at an OD of 0.50 at 550 nM) containing expression cassettes with the different WUS genes described above. The plates were incubated at room temperature for 30-minutes. Then the treated leaf tissue was moved to 562V solid media (Table 10) for co-cultivation at 21° C. in the dark. After co-cultivation, the leaf explants were removed from the Agrobacterium solution, and lightly blotted onto sterile filter paper before placing onto 70 D media (Table 10) and moved to the light room (26° C. and bright light). After three days, tissue was placed onto 13113F resting media (Table 10). Tissue was imaged after 8 days on resting media. Transgenic regenerable plant structure (RPS) were tabulated for each infected leaf explant, see Table 11 below.

TABLE 10
Media

Infection medium (20A); MS salts and vitamins, 0.1 g/l myo-inositol,
0.5 g/l MES buffer, 0.1 mg/l a-NAA, 1 mg/l BAP, 10 μg/l gibberellic
acid, 50 mg/l thymidine, pH 5.5.
Co-cultivation medium (562V) 4g/L CHU(N6) basal salts, 1 ml/L1000x
Erikssons vitamins, 0.5 mg/L 49B-Thiamine, 30 g/L Sucrose, 2 mg/L
2A-2,4-D, 0.68 g/L L-Proline, 8 g/L Sigma Agar, pH 5.8
First culture medium (70D): 4.3 g/L MS salt mixture; 5 ml/L 36J-MS
vitamin stock solution; 0.1 g/L myo-inositol; 0.5 g/L MES buffer;
0.1 ml/L a-NAA (1.0 mg/ml); 1 ml/L BAP (1.0 mg/ml); 40 mg/L
adenine hemisulfate salt; 20 g/L sucrose; 0.5 g/L PVP40; 1.0 ml/L
silver nitrate (2.0 mg/ml); 10 ml/L carbenicillin (50.0 mg/ml); 5 g/L
TC agar; pH 5.7.
Resting media (13113F); 4.33 g/L MS salts and vitamins, 0.1 g/l
myo-inositol, 5 ml/L 36J MS Vitamin stock solution, 0.59 g/L MES
buffer, 30 g/l sucrose, 2 mg/L BAP, 0.5 mg/L Kinetin, 1 g/l PVP40,
1.5 g/L Meropenem, 6 g/l TC agar, pH 5.6.

[0196] As shown in Table 11, expressing WUS genes from phylogenetically divergent dicot, gymnosperm, or monocot species stimulated growth responses of transgenic regenerable plant structure (RPS) in cowpea leaves. Average responses ranged from 0.5 to 5.0 regenerable plant structure (RPS) per explant for WUS genes while negative controls of “NO WUS” and “No Agro” showed no transgenic regenerable plant structure (RPS).

TABLE 11

| | Average |
|---|---|
| WUS SPECIES | (RPS)/Leaf |
| RV026527 (SEQ ID NO: 161) (ZOSMA-WUS) | 5 |
| RV026592 (SEQ ID NO: 196) (SL-WUS) | 1.5 |
| RV026522 (SEQ ID NO: 154) (GNEGN-WUS) | 3 |
| RV026531 (SEQ ID NO: 157) (MALDO-WUS) | 3 |
| RV026524 (SEQ ID NO: 158) (MANES-WUS) | 5 |
| RV026526 (SEQ ID NO: 155) (VITVI-WUS) | 5 |
| RV026530 (SEQ ID NO: 160) (GOSHI-WUS) | 3 |
| RV026533 (SEQ ID NO: 165) (AMAHY-WUS) | 2 |
| RV026534 (SEQ ID NO: 156) (PETHY-WUS) | 3.5 |
| RV026529 (SEQ ID NO: 162) (AMBTR-WUS) | 1 |
| RV026520 (SEQ ID NO: 164) (POPTR-WUS) | 0.5 |
| RV026525 (SEQ ID NO: 167) (PINTA-WUS) | 0 |
| RV026521 (SEQ ID NO: 166) (CUCSA-WUS) | 1 |
| RV026523 (SEQ ID NO: 159) (KALFE-WUS) | 0 |
| RV022814 (SEQ ID NO: 168) (NO WUS) | 0 |
| (- Control) | |
| No Agro | 0 |

### Example 14: Wus Stimulates More Rapid Production of Green Shoots from Transformed Tobacco Leaf Segments

[0197] Tobacco (Nicotiana benthamiana) seedlings were germinated and grown under sterile light conditions on 90 A medium (Table 7). Leaves were excised and dissected into 2 cm×0.5 cm strips while submerged in 20 A liquid medium (Table 7). Each leaf yielded approximately seven leaf segments. Segments from four leaves were used per Agrobacterium infection. Agrobacterium strain LBA4404 THY-contained PHP71539 (a plasmid containing virulence genes disclosed in U.S. Pat. Pub. No. US20190078106, incorporated herein by reference in its entirety) and a binary plasmid harboring a T-DNA. The T-DNA for one treatment contained no WUS (NO WUS) expression cassette. For all treatments containing a WUS expression cassette, the configuration of the T-DNA was identical except for the WUS gene used in the construct. The T-DNA configuration was RB+CAMV35S PRO::WUS::OS-T28 TERM+GM-UBQ PRO::GM-UBQ SUTR::GM-UBQ INTRON1::ZS-YELLOW1 N1::NOS TERM+AT-UBIQ10 PRO::AT-UBIQ10 5UTR::AT-UBIQ10 INTRON1::CTP::SPCN::UBQ14 TERM+GM-EF1 A2 PRO::GM-EF1 A2 5′ UTR::GM-EF1 A2 INTRON1::DS-RED2::UBQ TERM+LB with the variable WUS gene in bold and italics. The Agrobacterium suspensions were prepared in 15 ml Falcon tubes in 20 A liquid medium to an OD₅₅₀ of 0.5. Twenty μl of the Agrobacterium suspension diluted into 10 ml of 20 A medium per well (in a multi-well plate) containing cut leaf tissues. The plates were shaken slowly for 10 minutes, then put under dim light (˜25-30 μE m⁻² s⁻¹) for a three-day co-cultivation with Agrobacterium in 20 A medium.

[0198] Following a three-day co-cultivation, leaf pieces were transferred onto 70 D medium (see Table 7) and cultured at 27° C. in the dark. Ten (10) days after transformation, tissues were sub-cultured onto new 70 D media. Eleven (11) days after transformation, incipient shoots (green regenerable plant structure) were counted on all the tissues, as well-defined shoots had not emerged yet, or were just beginning to emerge. Tables 12, 13 and 14 show the number of incipient shoots per tobacco leaf segment eleven (11) days after Agrobacterium infection. As shown in Tables 12, 13 and 14 the average number of incipient shoots observed per originally infected leaf segment increased (relative to the NO WUS control value of 2.2 incipient shoots/segment) for all the WUS genes tested, ranging from 4.2 for Manihot esculenta (RV026524 (SEQ ID NO: 158) (MANES-WUS)) up to 16.5 incipient shoots/segment for Kalanchoe fedtschenkoi (RV026523 (SEQ ID NO: 159) (KALFE-WUS)) and Petunia hybrid (RV026534 (SEQ ID NO: 156) (PETHY-WUS)).

TABLE 12

| | Name | | | | | |
|---|---|---|---|---|---|---|
| | NO WUS | VITVI-WUS | GOSHI-WUS | AQUCO-WUS | PINTA-WUS | AMAHY-WUS |
| | RV# | | | | | |
| | RV022814 | RV026526 | RV026530 | RV026528 | RV026525 | RV026533 |
| | (SEQ ID | (SEQ ID | (SEQ ID | (SEQ ID | (SEQ ID | (SEQ ID |
| | NO: 168) | NO: 155) | NO: 160) | NO: 163) | NO: 167) | NO: 165) |
| Incipient | 1 | 11 | 1 | 0 | 1 | 0 |
| shoots 11 days | 2 | 4 | 5 | 2 | 3 | 1 |
| after | 1 | 11 | 6 | 1 | 6 | 1 |
| transformation | 7 | 1 | 6 | 4 | 28 | 3 |
| | 1 | 4 | 4 | 5 | 11 | 3 |
| | 1 | 3 | 16 | 9 | 9 | 7 |
| | 3 | 4 | 16 | 4 | 8 | 4 |
| | 2 | 2 | 22 | 10 | 3 | 4 |
| | 2 | | | | 2 | 5 |
| | | | | | 16 | 17 |
| | | | | | 5 | |
| Ave # incipient | 2.2 | 5.0 | 9.5 | 4.4 | 8.4 | 4.5 |
| shoots/explant | | | | | | |
| St. dev. | 1.9 | 3.9 | 7.4 | 3.6 | 7.9 | 4.9 |
| incipient | | | | | | |
| shoots/explant | | | | | | |

TABLE 13

| | Name | | | | |
|---|---|---|---|---|---|
| | MANES- | ZOSMA- | SL- | MALDO- | KALFE- |
| | WUS | WUS | WUS | WUS | WUS |
| | RV # | | | | |
| | RV026524 | RV026527 | RV026592 | RV026531 | RV026523 |
| | (SEQ ID | (SEQ ID | (SEQ ID | (SEQ ID | (SEQ ID |
| | NO: 158) | NO: 161) | NO: 196) | NO: 157) | NO: 159) |
| Incipient | 0 | 16 | 12 | 11 | 23 |
| shoots | 0 | 6 | 14 | 6 | 32 |
| 11 days | 5 | 9 | 2 | 9 | 26 |
| after | 7 | 6 | 4 | 9 | 9 |
| transfor- | 9 | 5 | 10 | 3 | 17 |
| mation | 8 | 7 | 1 | 5 | 20 |
| | 1 | 4 | 10 | 5 | 13 |
| | 4 | 24 | 8 | 11 | 10 |
| | 3 | 4 | 11 | 19 | 6 |
| | 5 | 11 | 4 | 14 | 9 |
| | | 5 | 0 | | |
| | | 10 | 6 | | |
| Ave # | 4.2 | 8.9 | 6.8 | 9.2 | 16.5 |
| incipient | | | | | |
| shoots/ | | | | | |
| explant | | | | | |
| St .dev. | 3.2 | 5.9 | 4.6 | 4.8 | 8.6 |
| incipient | | | | | |
| shoots/ | | | | | |
| explant | | | | | |

TABLE 14

| | Name | | | | |
|---|---|---|---|---|---|
| | PETHY- | CUCSA- | AMBTR- | GNEGN- | POPTR- |
| | WUS | WUS | WUS | WUS | WUS |
| | RV # | | | | |
| | RV026534 | RV026521 | RV026529 | RV026522 | RV026520 |
| | (SEQ ID | (SEQ ID | (SEQ ID | (SEQ ID | (SEQ ID |
| | NO: 156) | NO: 166) | NO: 162) | NO: 154) | NO: 164) |
| Incipient | 19 | 5 | 0 | 2 | 14 |
| shoots | 12 | 7 | 15 | 3 | 16 |
| 11 days | 16 | 7 | 21 | 5 | 30 |
| after | 21 | 6 | 16 | 1 | 4 |
| transfor- | 9 | 8 | 16 | 6 | 3 |
| mation | 25 | 16 | 1 | 6 | 19 |
| | 15 | 25 | 10 | 1 | 25 |
| | 15 | | 1 | 20 | 15 |
| | | | 1 | 10 | 12 |
| | | | 5 | 3 | 12 |
| | | | 5 | 3 | 8 |
| | | | 16 | 0 | |
| | | | 11 | 2 | |
| | | | 25 | 4 | |
| | | | 20 | 6 | |
| | | | 8 | 4 | |
| Ave # | 16.5 | 10.6 | 10.7 | 4.8 | 14.4 |
| incipient | | | | | |
| shoots/ | | | | | |
| explant | | | | | |
| St .dev. | 5.1 | 7.3 | 8.0 | 4.8 | 8.2 |
| incipient | | | | | |
| shoots/ | | | | | |
| explant | | | | | |

[0199] Seventeen (17) days after Agrobacterium infection, the number of leaf segments that formed green shoots were counted and tabulated as shown in Tables 15, 16, and 177. As shown in Tables 15, 16, and 17, when the frequency of observing de novo green shoot formation on Agrobacterium-infected leaf segments was calculated as a percentage, approximately 11% of the “NO WUS” treatment leaf segments formed shoots. As shown in Tables 15, 16, and 17, frequencies for all the treatments in which a WUS expression cassette was present (for all the WUS orthologs tested) resulted in shoot formation frequencies above the control treatment (11%) and ranged from 25% for Vitus vinifera (grape) WUS) (RV026526 (SEQ ID NO: 155) (VITVI-WUS)) up to 100% for the Populus trichocarpa (poplar) WUS (RV026520 (SEQ ID NO: 164) (POPTR-WUS)). FIG. 1 is a graphical representation of the percent (%) of treated leaf segments that produced de novo green shoots.

TABLE 15

| | | VITVI-WUS | GOSHI-WUS | AQUCO-WUS | PINTA-WUS | AMAHY-WUS |
|---|---|---|---|---|---|---|
| | | RV026524 | RV026530 | RV026528 | RV026525 | RV026533 |
| 17 days after | | (SEQ ID | (SEQ ID | (SEQ ID | (SEQ ID | (SEQ ID |
| transformation | NO WUS | NO: 158) | NO: 160) | NO: 163) | NO: 167) | NO: 165) |
| leaf segments | 1 | 2 | 2 | 3 | 3 | 3 |
| with shoots | | | | | | |
| Total # leaf | 9 | 8 | 8 | 11 | 11 | 10 |
| segments | | | | | | |
| % leaf | 11.1% | 25.0% | 25.0% | 27.3% | 27.3% | 30.0% |
| segments with | | | | | | |
| shoots | | | | | | |

TABLE 16

| | MANES- | ZOSMA- | | MALDO- | KALFE- |
|---|---|---|---|---|---|
| 17 days | WUS | WUS | SL-WUS | WUS | WUS |
| after | RV026524 | RV026527 | RV026592 | RV026531 | RV026523 |
| transfor- | (SEQ ID | (SEQ ID | (SEQ ID | (SEQ ID | (SEQ ID |
| mation | NO: 158) | NO: 161) | NO: 196) | NO: 157) | NO: 159) |
| leaf | 4 | 6 | 7 | 6 | 6 |
| segments | | | | | |
| with | | | | | |
| shoots | | | | | |
| Total # | 10 | 12 | 12 | 10 | 10 |
| leaf | | | | | |
| segments | | | | | |
| % leaf | 40.0% | 50.0% | 58.3% | 60.0% | 60.0% |
| segments | | | | | |
| with | | | | | |
| shoots | | | | | |

TABLE 17

| | PETHY- | CUCSA- | AMBTR- | GNEGN- | POPTR- |
|---|---|---|---|---|---|
| 17 days | WUS | WUS | WUS | WUS | WUS |
| after | RV026534 | RV026521 | RV026529 | RV026522 | RV026520 |
| transfor- | (SEQ ID | (SEQ ID | (SEQ ID | (SEQ ID | (SEQ ID |
| mation | NO: 156) | NO: 166) | NO: 162) | NO: 154) | NO: 164) |
| leaf | 6 | 5 | 12 | 12 | 11 |
| segments | | | | | |
| with | | | | | |
| shoots | | | | | |
| Total # | 9 | 7 | 16 | 16 | 11 |
| leaf | | | | | |
| segments | | | | | |
| % leaf | 66.7% | 71.4% | 75.0% | 75.0% | 100.0% |
| segments | | | | | |
| with | | | | | |
| shoots | | | | | |

### Example 15: Canola Stem Transformation

[0200] Stem explants ranging from 0.3-0.8 cm in length were segmented and co-cultivated with LBA4404 THY-Agrobacterium containing the construct RV029481 ((SEQ ID NO: 191) (GG-WUS+HSP:CRE+IPT)). After two days of co-cultivation the explants were transferred to 70 A media and incubated at 26° C. and bright light (16 hr. photoperiod at 60-100 μE/m²/s). After 7 days or 14 days of incubation, plates containing the explants were heat shocked by transferring to 45° C. and 70% relative humidity for 2 hours, following which the plates were moved back to 26° C. The number of explants forming green somatic meristems were counted 18 days after co-cultivation (Table 18). Explants continued to form somatic meristems after the excision of the GG-WUS and IPT genes.

TABLE 18

| | | # of | # of | % of |
|---|---|---|---|---|
| | | explants | responsive | responsive |
| Construct | Treatment | infected | explants | explants |
| RV029481 | No Heat Shock | 24 | 15 | 62.5 |
| (SEQ ID | | | | |
| NO: 191) | | | | |
| (GG-WUS + | | | | |
| HSP:CRE + | | | | |
| IPT) | | | | |
| RV029481 | Heat Shock | 39 | 18 | 46.2 |
| (SEQ ID | after 7 d | | | |
| NO: 191) | | | | |
| (GG-WUS + | | | | |
| HSP:CRE + | | | | |
| IPT) | | | | |
| RV029481 | Heat Shock | 43 | 24 | 55.8 |
| (SEQ ID | after 14 d | | | |
| NO: 191) | | | | |
| (GG-WUS + | | | | |
| HSP:CRE + | | | | |
| IPT) | | | | |
| RV022814 | Control 26° C. | 24 | 0 | 0 |
| (SEQ ID | | | | |
| NO: 168) | | | | |
| (NO WUS) | | | | |
| (−Control) | | | | |

### Example 16: Use of Wus Orthologs from Four Different Species to Stimulate Direct Shoot Formation after Agrobacterium-Mediated Transformation of Soybean Leaf Segments

[0201] Agrobacterium strain LBA4404 THY-harboring a T-DNA with a WUS expression cassette, a heat-inducible CRE cassette, and SPCN expression cassette and a DS-RED2 expression cassette is used. The Agrobacterium strains contain the poplar WUS gene (RV029630 (SEQ ID NO: 193) (PT-WUS+HSP:CRE)), the poplar WUS gene fused to a nuclear localization sequence (RV029480 (SEQ ID NO: 194) (ALA-NLS-PT-WUS+HSP:CRE)), or a poplar WUS gene and an IPT gene (RV029479 (SEQ ID NO: 195) (PT-WUS+HSP:CRE+IPT)). Another set of Agrobacterium strains each contain the Gnetum WUS gene (RV029631 (SEQ ID NO: 192) (GG-WUS+HSP:CRE)), the Gnetum WUS gene fused to a nuclear localization sequence (RV029482 (SEQ ID NO: 190) (ALA-NLS-GG-WUS+HSP:CRE)), or a Gnetum WUS gene and an IPT gene (RV029481 (SEQ ID NO: 191) (GG-WUS+HSP:CRE+IPT)). The WUS, IPT and CRE genes are flanked by LOXP sites. The six Agrobacterium strains are used to transform segments of tissue cut from in vitro-grown, sterile, immature soybean leaves. Agrobacterium methods, transformation and media progression through co-cultivation and shoot elongation are as previously described.

[0202] Soybean lines such as elite lines, including, but not limited to, 93Y21 can be used in this process. Leaf and stem explants are harvested, and leaves are cut into 3-8 mm sections, while internodes (stem explants) are cut into sections of about 0.5 cm in length. Agrobacterium strain LBA4404 containing the vectors described above are used for the infections, and all bacterial cultures are adjusted to OD₅₅₀ of 0.5 for infection. All vectors contain the selectable marker gene SPCN (spectinomycin). Leaf and internode explants are infected for 30 min and are placed on co-cultivation medium for three days at 21° C. in dark. After co-cultivation, explants are transferred to shoot regeneration medium. Infection frequency is evaluated by screening the transient expression of the selectable marker gene at 5 and 20 days after transformation. Heat shock-driven expression of the CRE gene induces excision of any WUS, CRE, or IPT genes which were stably integrated into the genome. Shoot and root morphology are improved through excision of the IPT and WUS genes. Shoot regeneration is observed about 20 days after infection. In addition, transgenic shoots are evaluated for the presence of the marker gene.

[0203] For the control treatment (transforming with NO WUS or IPT in the T-DNA) which contained the SPCN and ZS-YELLOW1 N1 expression cassettes (RV022814 (SEQ ID NO: 168) (NO WUS)), it is expected that no direct shoot formation from leaf segments is observed. However, when transformations are performed which introduce T-DNAs containing the Gnetum and Poplar WUS genes, it is expected that green healthy shoots will be produced. Agrobacterium infection of leaf or stem tissue with all six WUS constructs is expected to produce healthy fertile plants in which the WUS, IPT and CRE genes have been excised.

### Example 17: Dicot Stem Transformation

[0204] Dicot stem explants ranging from 0.1-1.0 cm in length are segmented and co-cultivated with LBA4404 THY-Agrobacterium containing a construct comprising a nucleotide sequence encoding a functional WUS/WOX polypeptide, or a nucleotide sequence encoding a Babyboom (BBM) polypeptide or an Ovule Development Protein 2 (ODP2) polypeptide, or a combination of a nucleotide sequence encoding a functional WUS/WOX polypeptide and a nucleotide sequence encoding a Babyboom (BBM) polypeptide or an Ovule Development Protein 2 (ODP2) and the IPT gene and HSP:CRE. After two days of co-cultivation the explants are transferred to 70 A media and incubated at 26° C. and bright light (16 hr. photoperiod at 60-100 μE/m²/s). After 7 days or 14 days of incubation, plates containing the explants are heat shocked by transferring to 45° C. and 70% relative humidity for 2 hours, following which the plates are moved back to 26° C. It is expected that somatic meristems and/or somatic embryos are formed 10 days to 21 days after co-cultivation. It is expected that explants continue to form somatic meristems and/or somatic embryos after the excision of the WUS, BBM/ODP2 and IPT genes.

### Example 18: Dicot Leaf Transformation

[0205] Dicot leaf explants are cut into pieces of uniform size, approximately 10-80 millimeters and co-cultivated with LBA4404 THY-Agrobacterium containing a construct comprising a nucleotide sequence encoding a functional WUS/WOX polypeptide, or a nucleotide sequence encoding a Babyboom (BBM) polypeptide or an Ovule Development Protein 2 (ODP2) polypeptide, or a combination of a nucleotide sequence encoding a functional WUS/WOX polypeptide and a nucleotide sequence encoding a Babyboom (BBM) polypeptide or an Ovule Development Protein 2 (ODP2) and the IPT gene and HSP:CRE. After two days of co-cultivation the explants are transferred to 70 A media and incubated at 26° C. and bright light (16 hr. photoperiod at 60-100 μE/m²/s). After 7 days or 14 days of incubation, plates containing the explants are heat shocked by transferring to 45° C. and 70% relative humidity for 2 hours, following which the plates are moved back to 26° C. It is expected that somatic meristems and/or somatic embryos are formed 10 days to 21 days after co-cultivation. It is expected that explants continue to form somatic meristems and/or somatic embryos after the excision of the WUS, BBM/ODP2 and IPT genes.

### Example 19: Nuclease-Mediated Genome Modification of Dicot Leaf

[0206] Methods of making genome modifications mediated by CRISPR-Cas nucleases are described in U.S. Pat. No. 9,637,739, US2014/0068797, US2019/0040405, and U.S. Pat. No. 10,510,457, each of which is incorporated herein by reference in its entirety.

[0207] Dicot leaf explants are cut into pieces of uniform size, approximately 10-80 millimeters and co-cultivated with LBA4404 THY-Agrobacterium containing a construct comprising a nucleotide sequence encoding a functional WUS/WOX polypeptide, or a nucleotide sequence encoding a Babyboom (BBM) polypeptide or an Ovule Development Protein 2 (ODP2) polypeptide, or a combination of a nucleotide sequence encoding a functional WUS/WOX polypeptide and a nucleotide sequence encoding a Babyboom (BBM) polypeptide or an Ovule Development Protein 2 (ODP2) and providing a polynucleotide encoding a site-specific polypeptide or a site-specific polypeptide. After co-cultivation the leaf explants are transferred to fresh media and incubated at 26° C. and bright light (16 hr. photoperiod at 60-100 μE/m²/s). It is expected that a genome-edited regenerable plant structure containing the genome edit and no morphogenic gene expression cassette is formed 10 days to 21 days after co-cultivation. It is expected that the genome-edited regenerable plant structure containing the genome edit and no morphogenic gene expression cassette genome is formed at an increased frequency of from about 0.1% to about 1.0%, from about 1.1% to about 10%, from about 10.1% to about 20%, from about 20.1% to about 30%, from about 30.1% to about 40%, from about 40.1% to about 50%, from about 50.1% to about 60%, from about 60.1% to about 70%, from about 70.1% to about 80%, from about 80.1% to about 90%, and from about 90.1% to about 100%, compared to the frequency of genome-edited regenerable plant structures formed when the dicot vegetative plant organ or its composite tissue is not contacted with the morphogenic gene expression cassette.

### Example 20: Nuclease-Mediated Genome Modification of Dicot Stem

[0208] Methods of making genome modifications mediated by CRISPR-Cas nucleases are described in U.S. Pat. No. 9,637,739, US2014/0068797, US2019/0040405, and U.S. Pat. No. 10,510,457, each of which is incorporated herein by reference in its entirety.

[0209] Dicot stem explants ranging from 0.1-1.0 cm in length are segmented and co-cultivated with LBA4404 THY-Agrobacterium containing a construct comprising a nucleotide sequence encoding a functional WUS/WOX polypeptide, or a nucleotide sequence encoding a Babyboom (BBM) polypeptide or an Ovule Development Protein 2 (ODP2) polypeptide, or a combination of a nucleotide sequence encoding a functional WUS/WOX polypeptide and a nucleotide sequence encoding a Babyboom (BBM) polypeptide or an Ovule Development Protein 2 (ODP2) and providing a polynucleotide encoding a site-specific polypeptide or a site-specific polypeptide. After co-cultivation the stem explants are transferred to fresh media and incubated at 26° C. and bright light (16 hr. photoperiod at 60-100 μE/m²/s). It is expected that a genome-edited regenerable plant structure containing the genome edit and no morphogenic gene expression cassette is formed 10 days to 21 days after co-cultivation. It is expected that the genome-edited regenerable plant structure containing the genome edit and no morphogenic gene expression cassette genome is formed at an increased frequency of from about 0.1% to about 1.0%, from about 1.1% to about 10%, from about 10.1% to about 20%, from about 20.1% to about 30%, from about 30.1% to about 40%, from about 40.1% to about 50%, from about 50.1% to about 60%, from about 60.1% to about 70%, from about 70.1% to about 80%, from about 80.1% to about 90%, and from about 90.1% to about 100%, compared to the frequency of genome-edited regenerable plant structures formed when the dicot vegetative plant organ or its composite tissue is not contacted with the morphogenic gene expression cassette.

[0210] As used herein the singular forms “a”, “an”, and “the” include plural referents unless the context clearly dictates otherwise. Thus, for example, reference to “a cell” includes a plurality of such cells and reference to “the protein” includes reference to one or more proteins and equivalents thereof known to those skilled in the art, and so forth. All technical and scientific terms used herein have the same meaning as commonly understood to one of ordinary skill in the art to which this disclosure belongs unless clearly indicated otherwise.

[0211] All patents, publications and patent applications mentioned in the specification are indicative of the level of those skilled in the art to which this disclosure pertains. All patents, publications and patent applications are herein incorporated by reference in the entirety to the same extent as if each individual patent, publication or patent application was specifically and individually indicated to be incorporated by reference in its entirety.

[0212] Although the foregoing disclosure has been described in some detail by way of illustration and example for purposes of clarity of understanding, certain changes and modifications may be practiced within the scope of the appended claims.

The application's sequence listing, which the Patent Office published only in electronic form, follows.

SEQUENCE LISTING (198 sequences)

SEQ ID NO: 1 - DNA, 3200 bp, Glycine max
agttttttagtagtattttaacgttttttgaaacacctaacattcttttaagatattaccttctgaattctaattttttatattttctttcaattttattattaatatatttatttattttctttgttatcttttcttaaaataaattatgattttattattttttttatcattttatatttttcacctacttcaacaaactaattttttagtttccggtttaccaactagcttgcctacttctagctagtttttttactagttttgacaaaactaactaaagtcaaaaagttaattagtagttgaatgttgaaaatatatcttattaaatcataaaatggttgataaaattatttattaaagtaactgaacaatataaaattacatggacatatttttatacaacttttaatttgacttttttctataaaaagaactataatatttataatgttagtattaaattaattttaaacatttgtagctttttatttatgaaatataaaaaaatctacataaacttattatatatcaccatcaatatcatatataataaaatggtaaaaatgagaaaattctatcatatgtaaaaaagttaatttttttttcttaaataaaaaagattaaaaaggaaaacttataaatgttaaagaacaaaaaagaataaatacaaaaagttataaaaactagtgttttaaaaaatataacttaaaatttttaataacttctaacattttttaaaacgttacttaaggtaacactttttaatatatcaacttctattttattatatatcactatcaatatcatatataataaaatggtaaaaatgagaaaactctattatatataaaaagttaaaaataatgaattttttccttatataaaatagattaaaaaaaattctaataaatattcaacaacaataacataataaatataaaaagttacaaaaaaaaactaacatttttaaaaatataactttagtgtttcaaaaatccttagagttgttaaataaaaacttatttaccaaatttttaaactagtaaaaaaattaaaaactaattaaaatatcttgttaaatatattttaaatagtgtataatttatcatgtaagataatattcttatttttataataattactttaaaaatcatatctaaaagatttttaatatgtaatattatatatatatatatatatatatatatatatatatatatattcataaaacatcattaaaagtgacattaaaaacatattaaaaatcacattaaagcacattaataacatttaatttcaatactaagaactctttcaattcttgaaccaattacacttgtcttaatgggggaaaaaaaaacaaactctatacttatccgatcggaaaaactgcaaaagagaagaagaaatgaatgggagtgacacgcacaaattaatttcaagataccagcacttagtagcaatttagtagcatttgtttggtagccgtcattcgttgcattgcaccgtcaactcgcaaaaaatttattagtagttttatacaccaaaaatatgctgcgtctctttctctctcccctctctatcaattacacctcttttgccctccattaaatgcaattgcaccctctcaatacgctctgcaattactcttcgctgccacattttcctccatttgttccccacttccctctcctccttcaatgcccttgtccctatctcttcttcttctcctcactttctctctgtaacacctcttcatgccatagcttctttttcttttcttttttaccatataagtaaacattttttttttcaaaactgtcccaaacccttccttcaaaacggtcatctcttttcaacccaaaacagatctacaccttcatcttctactcccactctcactggtaagttaaaaaaaatcttgtttgtaaaacttctgtcgcaaccagggtcactgcgtgaatctctgtaacattcatgttttttttgttaaggttgtctaaggtcattgtttttttttaaagaaaaaaaaaagaaactaactaatgaaactgtttggtacaatttttttttttttttttgtgagttctaacatttttcaggtgagtcacttgtagctagggctgtgagaaaaggaacgttattaggtctgcaagaaaaaaaaagaaaaatatcctgatatataggatatgcgttgtaggattttctccgagatcttcgtgggtgttatattttctttaaaaaagttttgattttgttttgcgaaaagacaagatcagataagggttacaatatttctttgctttttaattcatatattttgatatgatatatgcatagcgtatatttgtttcgaaattttgattaagtttttttctctttaatcttttttttctcttggaggtcacgtttgtatcactgagtttttttgtagtaacacacacacttactcgctttgacattgctatctgacagaaaatccaagggctcaacttcttaagctttttctctatccaagaacctcttaggagagagaaagtgatatatatagagagagaaagagtcaattctacatatacttgttggtggtggtttttgaggcatgtgaagtatgcaagccgttattatgatgattccggcgagaaacatgccttcgatgatagcaaggaacaacaacaacgttggagggttttttggatcatcttcatcacctttcactcttgcccaggtcggtgcttttaacttttcaccttctctttcaactcttttgactctcttaccttctcttttttttttttttcacaattgtccacctctttaatttttcacccttttttcattaaaatttttgaaacaaaattgacccatctcaaaattttcacttttttaacgatcagtcgatcacatttgcatcacaaattaaaccaaccagaccaaatatccttctcgatattacaaatccgcgtttccccaaaactgcgttatttttctccataaaaaagtcaaaagaaaaaaaaaattaaactttctttaaaaaaaacaagaaagaaagaaaagaaaatgttgatatgtttgttgtgtctttttctctgagagagaaccgtactatactacatgtgtttgaattgtgtttttgttagattgagaaactataatcctctctccggaaccttaaaagatccgtagcaataatcata

SEQ ID NO: 2 - DNA, 1547 bp, Glycine max
agttttttagtagtattttaacgttttttgaaacacctaacattcttttaagatattaccttctgaattctaattttttatattttctttcaattttattattaatatatttatttattttctttgttatcttttcttaaaataaattatgattttattattttttttatcattttatatttttcacctacttcaacaaactaattttttagtttccggtttaccaactagcttgcctacttctagctagtttttttactagttttgacaaaactaactaaagtcaaaaagttaattagtagttgaatgttgaaaatatatcttattaaatcataaaatggttgataaaattatttattaaagtaactgaacaatataaaattacatggacatatttttatacaacttttaatttgacttttttctataaaaagaactataatatttataatgttagtattaaattaattttaaacatttgtagctttttatttatgaaatataaaaaaatctacataaacttattatatatcaccatcaatatcatatataataaaatggtaaaaatgagaaaattctatcatatgtaaaaaagttaatttttttttcttaaataaaaaagattaaaaaggaaaacttataaatgttaaagaacaaaaaagaataaatacaaaaagttataaaaactagtgttttaaaaaatataacttaaaatttttaataacttctaacattttttaaaacgttacttaaggtaacactttttaatatatcaacttctattttattatatatcactatcaatatcatatataataaaatggtaaaaatgagaaaactctattatatataaaaagttaaaaataatgaattttttccttatataaaatagattaaaaaaaattctaataaatattcaacaacaataacataataaatataaaaagttacaaaaaaaaactaacatttttaaaaatataactttagtgtttcaaaaatccttagagttgttaaataaaaacttatttaccaaatttttaaactagtaaaaaaattaaaaactaattaaaatatcttgttaaatatattttaaatagtgtataatttatcatgtaagataatattcttatttttataataattactttaaaaatcatatctaaaagatttttaatatgtaatattatatatatatatatatatatatatatatatatatatatattcataaaacatcattaaaagtgacattaaaaacatattaaaaatcacattaaagcacattaataacatttaatttcaatactaagaactctttcaattcttgaaccaattacacttgtcttaatgggggaaaaaaaaacaaactctatacttatccgatcggaaaaactgcaaaagagaagaagaaatgaatgggagtgacacgcacaaattaatttcaagataccagcacttagtagcaatttagtagcatttgtttggtagccattgagaaactataatcctctctccggaaccttaaaagatccgtagcaataatcata

SEQ ID NO: 3 - DNA, 3300 bp, Arabidopsis thaliana
taacaatgataagctacattgagtgtatcagttctaaaactttatagtatgctacaatcaatttttctaagtaacaacttcaagcaaggaatcacacacacacagtggtacataataaacttgattttaatatcatatgatcagcatcattaacggaataagttaagtaattcgtcatccatactactaagtcatattaaaatcataatcaaacttaaaagccgattagaaagagagcaaatatatctaaaaattcacgaggaagacgacaaatgcaaggaaacacagctagtattattaaacttaatagatattggatgaatgactgcataatatatatcacattaaaagtggacataaatttgcatatgtgtaatgtacctctccacaattaatcgcggaccatttattttactattacaagtcaagtaactttatattgttgatccataattcttttcgaacataaaatcatatacttaggccattttcaactgtcaaaactcgaatccgagaaccaaatttcaccattttccaaaaatgatgagtgtcgaccaaatggggtactactgtctaatcaggaacttgtgaacaaattttcaaccttttccaaataagacgagtgtcaaccaactttttccaaccaagagatattgggttgctacacaaatacttaatagccattgcatatttatgcatatgcaaatgcagggtcgtggcgtcagaaagaaacataggaccctcaacatatttaatattttgggagctatatttgactatttcatattagaaaataataataaaaaagtgttggttttatatcaaattgtaatttacgaaaaacttatgcttttgcgcaatgatttttgtaaagtatctactatgtttagtgtttacattgattagtaggctgccgttttttttcttgtgtattatgtactatatatgaatatgaacatttgtaaaagtgaatcttgtcattttcttgttgaaaacatatatagtatgtgcaaacaaagcataggttaatccaataccacacaaataacacgtcaggtaaatccaataataaatcgtatgtgcatgtatgtgtattcatgtatgttacatgaatgtctgaatcagtcagtgtacgtatatgatgtaggtgatgtaaatcttaatgtatgagctgtttcttggaccatggtccacaatggatattgctccccaactacattagtcaatcgactggccaatttttaattaagataattaatccaaactaccattaaatataactttgaccttttttctattcatttttagatattattggaacttacgtagtttacatgcatctcatccctttcttttgctccttgaaagtgggtccaatcacaaaaaatgatcttatattttgtattttgtattttaaaaactcataattatataggttcaaaaatttaattaacatcagtgtatactataattactactctagccaacaagataaattcattttgacatcagccaaaagataaaaatttggttaaaaactattggattagcttttagtatttaatattttatgtactgattaaatacgaatttagaaatctaggatataagtgagggtgtataataagggaggggtggaccattaatagcgatgtgcaattaaaaattatgattaagaatctaggaaatttgtagattgcttagttatttttatggcgatcgtcgtgtcaatgtcatggattttgaaactttaaattaatctcttaaattagcacctacctttgaattttatagaatctttttattttatatgtttaattttatagaatctaactagcttattttgagattaaattgtttagttacttttataacagtataaatgtataatgaggacctaagaatgtagtcctgtaatgttcttgctattctacttaatctcatcaccaatcaaccatcaaaagaagctagtactaataaaacctgcaggtattcgaataataattaagctcaaacactatactaatttatggaggattatatattcaatgaattaggaacctcatgatggacattattgactgatataatgtgtatactaattgtgagtatttaaaaaccatacaaagcatttatatgtccacatatattggacacacatgcaatcaatgttcaatatgctccacacacagaaataaaaatactctttctgatcatatgatacatcatacatatactaaaaaaatctaaaatgaactataaccacaagcatatataataacaatgaaatggtaatgtttcttcatttttatttgttcaaattcttattcggttgttttttcttaccctacgagaatccgtgaggtcaaagggaaacagtgattttttttttgtattttgttttttaaattgatgaactgtaaaactctctctctagaaaaatatataagtagtagtatgaattttctctcactaaaagcattaatggacctttcgataatcataaatgcaatgcaccctctctatgcatttcgcaataactccttttccttctgccacatcctcttcctcacctctttctcttcttccctttctcctaagttcctcctccaccaaattctccatttatttcgttaactatcctccatttgttttcttctgaagagtgatatattctacctttctctggttaaagaaactccctgaatccaccggttatgtcttgaccggctataagcctataaactgatgccctaagacacctttttaggtttctcaataattctccgcatctatcttttcttctccacaagtaagagaaccagaaaaccagagaagaagccgagctagctagggtttcattgtgtgcacaaaagtaagatctctctctctaaccaatacttgtgtaatttgtctttgtttctttgagcaaatattgcatgtttgttcatattagccggatccgttttatattttttcatgatctacattttatctttattttgtttgtaaattaatgagttttttttttttttttctgtttttgtcacgatctaaaaaacaagcgttacaaagaagaagaaaaacctttttggagttagaagtgtaaaaggggtttcagtttgacgaattttccttagtagttgtgtaaaaaaaggccattgacttaatgtcaactctatatatctacacatttttttattaattagtttttgtttttttcccacttcatttacctttagtcaatgaatttttactgaaaacgttttttcaaggtcaatttcactgagttaaaaaaaa

SEQ ID NO: 4 - DNA, 6022 bp, Glycine max
tcgttgaaaacagaaaatggtgatgagaatgtatttggttggatttttgaaaacattttcagtgaaaatgaaaacagaaaataaccagaaaatgaaaataataaaatttcgttttcagcgttttcaattgaaaacaagaacctcattttggataaaatgaaaatgagatgaaaataaatgtaattttaagcaaatttaaaaatacaaaaaaagtcaatatatcataaattttcaatatttttatttcctaaaaacagaaagcaaaaagttaaaccaaacatatttttagaattctaatctttagaaaataaaaacaattttcaaaaaatgaaaataaaaaataaaaatataaaccaaacacacaatatttcagcttgtgagtgcaaaacatatgcacgtttttcatttaagtatttctacagataactagacgaattgaaagttgttataaattttacttcaacaaccaccttaaaagggacctccgcatgatgatgaacgccactagttagaccatctctaatctctctgcattcttgcatgataagagaataatgaataattctaacataaaattagcttacgacattttcgcctctattactaatttgctagtattttatctttatctacctagcttgcattctgcatatgaaatttgtggcatgtaattttattaatgctatttaaaccaatgaatatattgaagctgcttctatgaattttactttttaacctaacatcaaattaatgacaaagaaaaggttcaaaaaattattttgaagcactactcgatcagaaaatggttcaatgaaatataaatgcatagctacagtggtgaactaagatctataatctctatatatccttatatattctttcattgatattcctcttaaaagtacatccaattgattgaagccttatctttacatgtataataaataataaaaaattagagcaataaacatatttacagattaactgacttaattaaagacaataaatatactaaacaaaaagaataagactataagagcatgtctcattattattaaaggtaattttgaaaataatatataaatttaggataaattatatatataaaaaggaacaaaaggcagcggttgattattaaattagttaatttgttgatgacttgtaaatcatgagaaactaaagaaaaataaaaaaacacctcaaacttccaccaaatcaccatatccaccgacagccaaatcaagtcataaaatgtcgatgaacctccccatctaccttgatcatgagtttgggattcaattgtagtgcattgacacctcgctttcaaagcaccctccagcctaatttgtagagccagtcaaacttgattctctacttttacctttatttaaaaaatcgtgcttaatatataatgcaagtttatagtatacccattccctttcttcacaaaaaaaaaaaatgaggaaatagaacattaagtactaggaatagacagagaagtctttcttaagttgggactgggatctcccgatctggtgggcggtactgtagcttaataaatctgactggggctattaggtggtgttttgtttgggagtttatttttttattttttatttttaaatttttaagatttataagatatgtatcaataataaattactttaagtttaagatatcatgatattttttgtttttcagaaaaggctaaaaatattgattttttgttttcagttttggatctatttttaaaagaaaatatttttaaaattttaaaaaaatacatttttattcttattttttttatttgaaaataaaaacaaaaaaacactcaaatcacgcatcattctagattttgagtgtctttttttctcaatgacaagagactattaatattttttagttcacttggtcataaactaattccactattagattttgagtgtgtgttaataaaaaatatttattaatcaacaatttttttatcaacaaatattaattttattaatagagagaatcaaattcacaattttttttaatcattcaacccacctcatatctcccaaatctatcaccagattaaatctttctaccatataagaatcaaatttaaataaacacaattattatttagtgactaattttgtcttctaaaattagtatataagaaaatttcatatttaacagctccaataagtctcactatgattatataccaaaattaaactcttagaagaattgttactgaaatcattaatatatatttttatggagaaaccattaaatttcaaaagagtctttctattataaattataatttataaatatgcttaatcaatatttcgcactaataaataatagaatgtttgcttataattaatttaatttgcgacgctagggttgagaaatacaggagttaaaagaagttgttgagttcagtggacctaggtcacaaaataaaagttaaattaagcatgaatgatatcgcgctctaactctcttctgttcacgtatatccatttacaccagtcgtccctccataaatgcttctacaccctctgcaataactccatgctgccaaaccttctctcacttgttctatttatctcctcctgcgttgtttcgttctgtctctattttgctttggcccaaactaaaactccatcaactactccttcacttccctaattccccccacacccattcttgtttctaccgttccagtcatcatcaacataactaattaaggtttacaccactatcaaacgcttaaggtcccctctcgcatatacgcgtgtttaattttagctttgacttgctttgctttgcttagcttagttaatttctgagtgagagaaaggggtaacggctacgtcccccgcattgaaattggttacttgactagcgtaatcatctgttttgtcaaacctttcacactctctacccttattttgtcttttctgatttccctagcttttgtcttttggggtggcaagttttgcgtgtaagataagagtattaaggccaaccaaggccaggtaaagtcaccagtgcctctttgcaaccttaacataagaatgaatctccaaacaaacacttgaaagtgctgcatatcgatcagagacaaaacagcggcacgagctggtcgatgcttttatcagtttcagctttgcgagacggttccataaatcccaattgcaagtaccatcaaactttacagagggaaagcggtcgattcattgctgtcatcttcgtggttaatctaacaggtgatcacttccctaatttcttattttctctcctaattaaacagagatagaacaccttttcttttttgagttgaacagcaatttgactaaatggtaaaacttgtacattttctttattctcgatggggagatctggcttagaaattttttacatatagaactccgattattaatcgttgttgttgttatcaaatttgttcaatttaatgctttattgccaacaaattaagtttagtctttttgagtaatgtgagtacttttctaagcatctaataataagctattgaagctcaatttgcctaaagcaccaaacttaatgctttattattttttgttttataggatacttttacttactttataagaattacaaaataaaatttagttagtgattttatatttgtgaaacttttatattttttaaatattctgtaaattattaaaactctattatcttattacagtatttgtttttatgataaggaagtggaaggaaaatgaaaagaaactatattatttttttaatgtttatttgagtgggaaaaaaagtttcaattctaaggcccatgagaaaatataattccttccctcccaaatttggcatgaaagggttgaggggaaaaatgatctcttactcatttttatttttgtttttttaatatatatatatatatatatatatatataacatgattttttatataaaaaataaatgatttcaccttatgaaaaatagttaaatataaaaagtttgtcttttaaagttaattgtattttttttaattagaatgataaatataactttttttgtaaggcctgtggctctttcgtgcttccataagcatcactatgagactaacttaaacagttagcccttttcccctttccccctttttcaaatatgcaaaccgaactcgtctatttattttcacttatctaaataattacaggaaaaattctctacgtttttcttatttccatatatcaaaataatacattttttctattcttttaatattttgttttttatctttcttatttttttctctattttatttctaattcaaatagaacattaatttgtttctatcgaatctttgttacccataataaactgtgtgtagtgtatacttgtaggttttttttttttaaaaaaaaatccttctgtctgctcaattaacaaataattctaaatcatttaatattctcttactaattttcctacattctttatatgtaaatgttctatatcttcaaacaaaatatcccggtatacattaactaataaccgaatactctctctccgtcttaagtatcgatctagattaatttatccagataaaaaaaaagttaatacacgtatgaaaaaataataattttacaaaattaaatttattaaataaattaaaaaaagtactattggtattacattaaaaaactaaagtgaaacttactaaaagagaataattttaaatttgacttctggatatataattgtattaaatagttgtatacataatttctatccttgtacaaaattgtctataataaaaaaattcatgtgatttataccaattttttcccatacccatatatattaatcttgtaaaatgtttaggatatataattaatatttttaactagaactagaatttgaatttttacttaagtaaaaaaaaaactcattttagaattaaaatcacaattattatagcataactaaaatcaacccttcccaattatattttggaaccaattgaccttaatctcaattcaatttgtaaaaaaaaaaagcgtattaaatagaaaaaaatacattaatattttaaaatataagcaatatatttaatacatttttcatttaattaaagaagaagattagtaagaagatattgtaagaaaaattgtaattattgtttgtttttattttttttatgcaatagaaataatagattttatatgattatagaaataataaatttaaacttaagatttcgtgcaaaaatttcaaattctctcacctcattacatgaaatatagtatatcttttatttttttcattttgtgtgcaagttaaagaacattaattacattaaacaatattactatcattgttcgtatttataaaatctaattaaattaaaaatacatctttattcattactatttccgttcttatttataagatccaaattattaaaaaaacaatttaaatatttaattgaatatgattgtttggtacatccttaattgaatatgtttaataatttcttaagaaatgtgtggataatagttaacatgaggcttattttctttttattaatgctaatacttattaaattatatattttcatatttttgagatgccagatgtattggatttttaatttttaatacattttacaaaatgtacatagaaagtcaatataaataatataattaatttaaaagaaatagcattgctcatttactattttactaaaaatattaaatttttgccttatgtagttatgaacatttaatgtaataataaactaattctaatgtatattatattgattattgaacttctttaaaatatattcttaagggccctcgctatatagggctacacaaactacactcttcttggtcgatctcccacatttttctctacccctcgcgcgtgttaaattttttgaaatcctggttttgcagagaagctatagagaagaagattgcggcttgtgaacttaaggatttaagtgaagtca

SEQ ID NO: 5 - DNA, 5966 bp, Glycine max
tcgttgaaaacagaaaatggtgatgagaatgtatttggttggatttttgaaaacattttcagtgaaaatgaaaacagaaaataaccagaaaatgaaaataataaaatttcgttttcagcgttttcaattgaaaacaagaacctcattttggataaaatgaaaatgagatgaaaataaatgtaattttaagcaaatttaaaaatacaaaaaaagtcaatatatcataaattttcaatatttttatttcctaaaaacagaaagcaaaaagttaaaccaaacatatttttagaattctaatctttagaaaataaaaacaattttcaaaaaatgaaaataaaaaataaaaatataaaccaaacacacaatatttcagcttgtgagtgcaaaacatatgcacgtttttcatttaagtatttctacagataactagacgaattgaaagttgttataaattttacttcaacaaccaccttaaaagggacctccgcatgatgatgaacgccactagttagaccatctctaatctctctgcattcttgcatgataagagaataatgaataattctaacataaaattagcttacgacattttcgcctctattactaatttgctagtattttatctttatctacctagcttgcattctgcatatgaaatttgtggcatgtaattttattaatgctatttaaaccaatgaatatattgaagctgcttctatgaattttactttttaacctaacatcaaattaatgacaaagaaaaggttcaaaaaattattttgaagcactactcgatcagaaaatggttcaatgaaatataaatgcatagctacagtggtgaactaagatctataatctctatatatccttatatattctttcattgatattcctcttaaaagtacatccaattgattgaagccttatctttacatgtataataaataataaaaaattagagcaataaacatatttacagattaactgacttaattaaagacaataaatatactaaacaaaaagaataagactataagagcatgtctcattattattaaaggtaattttgaaaataatatataaatttaggataaattatatatataaaaaggaacaaaaggcagcggttgattattaaattagttaatttgttgatgacttgtaaatcatgagaaactaaagaaaaataaaaaaacacctcaaacttccaccaaatcaccatatccaccgacagccaaatcaagtcataaaatgtcgatgaacctccccatctaccttgatcatgagtttgggattcaattgtagtgcattgacacctcgctttcaaagcaccctccagcctaatttgtagagccagtcaaacttgattctctacttttacctttatttaaaaaatcgtgcttaatatataatgcaagtttatagtatacccattccctttcttcacaaaaaaaaaaaatgaggaaatagaacattaagtactaggaatagacagagaagtctttcttaagttgggactgggatctcccgatctggtgggcggtactgtagcttaataaatctgactggggctattaggtggtgttttgtttgggagtttatttttttattttttatttttaaatttttaagatttataagatatgtatcaataataaattactttaagtttaagatatcatgatattttttgtttttcagaaaaggctaaaaatattgattttttgttttcagttttggatctatttttaaaagaaaatatttttaaaattttaaaaaaatacatttttattcttattttttttatttgaaaataaaaacaaaaaaacactcaaatcacgcatcattctagattttgagtgtctttttttctcaatgacaagagactattaatattttttagttcacttggtcataaactaattccactattagattttgagtgtgtgttaataaaaaatatttattaatcaacaatttttttatcaacaaatattaattttattaatagagagaatcaaattcacaattttttttaatcattcaacccacctcatatctcccaaatctatcaccagattaaatctttctaccatataagaatcaaatttaaataaacacaattattatttagtgactaattttgtcttctaaaattagtatataagaaaatttcatatttaacagctccaataagtctcactatgattatataccaaaattaaactcttagaagaattgttactgaaatcattaatatatatttttatggagaaaccattaaatttcaaaagagtctttctattataaattataatttataaatatgcttaatcaatatttcgcactaataaataatagaatgtttgcttataattaatttaatttgcgacgctagggttgagaaatacaggagttaaaagaagttgttgagttcagtggacctaggtcacaaaataaaagttaaattaagcatgaatgatatcgcgctctaactctcttctgttcacgtatatccatttacaccagtcgtccctccataaatgcttctacaccctctgcaataactccatgctgccaaaccttctctcacttgttctatttatctcctcctgcgttgtttcgttctgtctctattttgctttggcccaaactaaaactccatcaactactccttcacttccctaattccccccacacccattcttgtttctaccgttccagtcatcatcaacataactaattaaggtttacaccactatcaaacgcttaaggtcccctctcgcatatacgcgtgtttaattttagctttgacttgctttgctttgcttagcttagttaatttctgagtgagagaaaggggtaacggctacgtcccccgcattgaaattggttacttgactagcgtaatcatctgttttgtcaaacctttcacactctctacccttattttgtcttttctgatttccctagcttttgtcttttggggtggcaagttttgcgtgtaagataagagtattaaggccaaccaaggccaggtaaagtcaccagtgcctctttgcaaccttaacataagaatgaatctccaaacaaacacttgaaagtgctgcatatcgatcagagacaaaacagcggcacgagctggtcgatgcttttatcagtttcagctttgcgagacggttccataaatcccaattgcaagtaccatcaaactttacagagggaaagcggtcgattcattgctgtcatcttcgtggttaatctaacaggtgatcacttccctaatttcttattttctctcctaattaaacagagatagaacaccttttcttttttgagttgaacagcaatttgactaaatggtaaaacttgtacattttctttattctcgatggggagatctggcttagaaattttttacatatagaactccgattattaatcgttgttgttgttatcaaatttgttcaatttaatgctttattgccaacaaattaagtttagtctttttgagtaatgtgagtacttttctaagcatctaataataagctattgaagctcaatttgcctaaagcaccaaacttaatgctttattattttttgttttataggatacttttacttactttataagaattacaaaataaaatttagttagtgattttatatttgtgaaacttttatattttttaaatattctgtaaattattaaaactctattatcttattacagtatttgtttttatgataaggaagtggaaggaaaatgaaaagaaactatattatttttttaatgtttatttgagtgggaaaaaaagtttcaattctaaggcccatgagaaaatataattccttccctcccaaatttggcatgaaagggttgaggggaaaaatgatctcttactcatttttatttttgtttttttaatatatatatatatatatatatatatataacatgattttttatataaaaaataaatgatttcaccttatgaaaaatagttaaatataaaaagtttgtcttttaaagttaattgtattttttttaattagaatgataaatataactttttttgtaaggcctgtggctctttcgtgcttccataagcatcactatgagactaacttaaacagttagcccttttcccctttccccctttttcaaatatgcaaaccgaactcgtctatttattttcacttatctaaataattacaggaaaaattctctacgtttttcttatttccatatatcaaaataatacattttttctattcttttaatattttgttttttatctttcttatttttttctctattttatttctaattcaaatagaacattaatttgtttctatcgaatctttgttacccataataaactgtgtgtagtgtatacttgtaggttttttttttttaaaaaaaaatccttctgtctgctcaattaacaaataattctaaatcatttaatattctcttactaattttcctacattctttatatgtaaatgttctatatcttcaaacaaaatatcccggtatacattaactaataaccgaatactctctctccgtcttaagtatcgatctagattaatttatccagataaaaaaaaagttaatacacgtatgaaaaaataataattttacaaaattaaatttattaaataaattaaaaaaagtactattggtattacattaaaaaactaaagtgaaacttactaaaagagaataattttaaatttgacttctggatatataattgtattaaatagttgtatacataatttctatccttgtacaaaattgtctataataaaaaaattcatgtgatttataccaattttttcccatacccatatatattaatcttgtaaaatgtttaggatatataattaatatttttaactagaactagaatttgaatttttacttaagtaaaaaaaaaactcattttagaattaaaatcacaattattatagcataactaaaatcaacccttcccaattatattttggaaccaattgaccttaatctcaattcaatttgtaaaaaaaaaaagcgtattaaatagaaaaaaatacattaatattttaaaatataagcaatatatttaatacatttttcatttaattaaagaagaagattagtaagaagatattgtaagaaaaattgtaattattgtttgtttttattttttttatgcaatagaaataatagattttatatgattatagaaataataaatttaaacttaagatttcgtgcaaaaatttcaaattctctcacctcattacatgaaatatagtatatcttttatttttttcattttgtgtgcaagttaaagaacattaattacattaaacaatattactatcattgttcgtatttataaaatctaattaaattaaaaatacatctttattcattactatttccgttcttatttataagatccaaattattaaaaaaacaatttaaatatttaattgaatatgattgtttggtacatccttaattgaatatgtttaataatttcttaagaaatgtgtggataatagttaacatgaggcttattttctttttattaatgctaatacttattaaattatatattttcatatttttgagatgccagatgtattggatttttaatttttaatacattttacaaaatgtacatagaaagtcaatataaataatataattaatttaaaagaaatagcattgctcatttactattttactaaaaatattaaatttttgccttatgtagttatgaacatttaatgtaataataaactaattctaatgtatattatattgattattgaacttctttaaaatatattcttaagggccctcgctatatagggctacacaaactacactcttcttggtcgatctcccacatttttctctacccctcgcgcgtgttaaattttttgaaatcctggttttgcag

SEQ ID NO: 6 - DNA, 456 bp, Zea mays
aagcttgctttcacatctcctccggtcctcctccatgtgtacaccaaacaaaccaagaagaaaaaaatgcatggttttgttcccgatttataccttggagcaacccttccattctcttgaaattttctttgtcgccccttgaacttccccccatatgtccagtccagctacaaattaatggcgacgagcgatgaaacgcacggaacatatatgcctcagcaggcaaacgtcccagtcgtcgatctctggcacttaattaattgtttatattaattccaactcgttcgtgcaacggtgcaaacaaaacaagctgacgatgtcgagtcgctgtttccccttccaccttaattgcttttgcagccaaacctcctgctggacaaccagcagctccagctactgcagcagcaacacctgctggaccagatcccggcgacgacggcggagagcggcgacaac

SEQ ID NO: 7 - DNA, 3000 bp, Oryza sativa
ttaaaaaaatctggaaaaaagaagcgatttaaaaaaggaaacaaaaaagtgacgttaaaataggagatcttaaaaaaaagaaacgcgtagggatgcagctggtgcgcgcgccggctcctttcccttgcgcgcacgcgcgctagcatcccccataagtttaacccataaattatatttgcttcgttcgtttctcaatggcttgttagtcataggtcaatcaatcagagtctagaaaaagaggtaattttttccattgttgagaagatattaggagatactatttttttagtgtgaaatttgatatctatactagctatctcggtataaaaattactttaaatgtaaaatttagatgcctcaatatatatacttttttaagaaccgtataatttctcatagaaaaaagcaatgaagacggacatgactctcattagtagtgtacttttttttttcctaatccactatatagtgtaccattatccattaatttcttttatcttttacaactttgattttgagggatttgcatactgttttgaaaggttgattgtggttatttctcacttgattagatgcatgagtttttaaaataatttaatttcaagtagatacaatactcatgtatagatgatataattgtgtattattccctccatcctacgtatttttagtgtttaaaatttgttagcatttcttgagtattattttcctaacccacctaattaaccactgaaattatttctcactagtttgcatcgctgggcatgatatttcttattaaggatgtgtttagttcacattaaaattggaagtttggttgaaattgaaacgatgtgacggaaaaattaaaagtttaggtgtgtaggaaagttttgatgtgatagaaaagttggaagtttgaagaattattttgaaactaaacacggcataaagtgaactctcgggaggccgggggcatcgtgaaataaaaaagaaatgttggatatcagagaaggggctctcgtattgaaattttgttaagaggggtgagtttcgaatcgggatcggcgagcccatactttaagaggatatcttgaaataatttcaccgtaaccttaatttacgctaaaatccctaaacatatttatattcgtggacatggcgagtacatgccacgtttcttctgctagtaatttttcacataaatttttttttctcagcaagaaaggctggctatatactccagtgcagaaagagtgaaaaagactacaccaaacaagcatgaggcgtgtggaggcatgaaaacagtacgtacccagggcacagcagtgaaaacatcgatctcttcaccctgcatggtgtctccttaaaatctgatcgatcgactcccaaaaatataagtaaaatactcgagtcaaaatgcatcagtttgcatgcatagtgaaacagcagcaagctggtcttccacaggatactttttgacccattcctcctatacatgcatgtaattaatcacaaagttgcaaaaaatacaatactatgattgtgtatttgtgtgtactatatataaaacaaataaattaacctagtagtaactgatcagtatcgatcgagagtcaacaaaatatatgtagactacgacgatacgtgtgtgccttcctgttttcttttgttcttatctttgggccgcactatacgctgcatctatactaaacagtagtgaaaaatctacctctccaccactcaattattacgccggtctataataattcgttgtataaattacggggcaacagtgaattattcatgtgctcttgcgtgtaggattgccaaacaactgtttcatggtcagataaatgaaaaaaaagcgacaaattggtaacaataaggaaatgttaattaatttatgacatgtattactttcattaaaaatataatagtttctgactatacatgtatctcggaggtacataaccaaaaattcttagaggaagtataaaaaaaatgttttcttgttattggctacgaggtctcccaaaaatccaatgttgtacaaatactatattacatgtcaatttgaaattgtgttaataagtaaaaaaggacactccaatttctccatatcctcaattgaggaaatataaaaacaaaatttgtttaaaaaaatgtttcaggaagtataaaaaatgttttattgttcttggctatgaggtctcccaaaaatccagtgttgtacaaacactatattacatgtcaatttgacattgtgttaataaataataagtcaaaaaaggacactctaatttctccatatcctcaattgagggaatataaaaacaaaaattggaattgaaagttgaaaccatgcaccactagtctctctctctctctctctctctctctctccccttccatctctttctctcccctagcaattacactacgccttctccataaatgcgattgcaccctctcaacactccgcggcaataactccttcgcccccctctccacattctcttccacctgtgttccccttttcttctcctcttcttcttcctctcctcctcctgatcctgatcgagaagatctcaccttgatctcttgccgtgtgatctctagctctcgctagccctctgaaccttgcagtttgttgtttgcacccggtgaaacatcttcttttgtgcaggtaggagagacagcaaagcagagataagagttctatatttgcatgtagttcttgtcttggatctcactggctggctgtctcctctctgcagcaaggttcgttgggctagcttgtgtgctagatctgtttctacttgcgtttgcgttgcttggcaagcaagatatatatatatatatctatatctatctatctatcattctatctccctacatatttagagctagcactttgtgtgttctttgggtttgggacacactcatatacgcgtgttcatgagtggaaatggaaggagctgcaagggcaagaattagggtttgagatataggagtata

SEQ ID NO: 8 - DNA, 3000 bp, Arabidopsis thaliana
ttctgatcgaaaccgagaggataatttggaataagtaataacgaataatttgttaacaagtcgctttttatagattccttgtgagaaaacgtctttatcatatcaaacgatttttggtgagttattaatcttgtcgcagcattaagcatatatgatgccactttaggtcgtcggttacgttaattaacttacataaaattagatccaagaaaaaaaaatcttgcataagaaaagaagaaagaactagtttatttattaagctgtgagtttatcctaaaatatagtttggcttgtaaactagaattacatatagcagctgcaaaaaatgatggtgatgatgattttcacattgacaacaacaattatacaacgttatgatggtcgtcaatcgatatcaactcgaaaatataatttagaacttttgcatatacataggcacacacatatttttgtatgtatgaacatggtttagtgtatagttgatagtttaaagacattgattctttgaatggtcggagcttttagtgcgtttggttggtcggatcgccttgaaagctaaaaaaagacaactttgtccgtatgtgttgtcctagttttggagtaatttattttcgaccgttttagccattagcggaaaccacctaactctctctatcaaatgttctttagcgttggtccgttgcaaacatttgatcactgtattaataacatcgaccatacgatgctgttttgttcgtaccaaattcaccgtagtaaacgctgaaactttttttatttttttgtgtgtgtgcgcacaaaacgctgaaactagttaaaatataaatatattggataataagtataaagtacccaatatatttgtatctatttatattcgtgacatttgaatcgagttttacatggtatcggagtaacgagacaatcgataccatattattgctttgacctaccagttaatcaatatatacatatttcaagtctattaactcgtaagtctaatacaattagaaaaatgaaaaaaaataaaagaagaagatatatatggaaatattggcatttgtcttaataatgtaatcaatcatcaattgtagaagccaaaggcatctctagtgtcaacgaatttgaattgatataccaactaacatactttcaaaaccggtagattatacggtattggaagatgatgaaaagaagagtttatttctcttcaaaagttacaaattatataaatgtcatataccgtaagatgagatagttgaatattcacgtggtgtttatagtgtctacataggtaaaagacattaatcatacaatcgtattaacaaaattgattgtaaaaaaaaaaaaaaaagggttgattgtaagttcgtaacctctatgtggactgtgtggcccaaaccaatcggtcggaagctacaatactgtgtccgaatcctaaaaggctaaaaactgactcggaccagcttagagatcatatgaaattatggatagcggaatagctggcaacttcaatgaattctgaatttaaaacatttttttttatatatatagatgatttggcgattttcgaactggaatggtgaaaaagtggttgagtacactattagtttatttatttaaaaaatagagggaaattcaaatgaaaaaaaaagtttcatctacagaaaaaaaaacacgtcaaaattccaaaaaacttgaacgtcttgaacaacggtataaccgtataagaaagggaacttaaaacttaaacgtctacatgattgaaagggtaaaaatattcatattacaatggtataagaaaatggagaagccagaggagcaactccaaagaagaagatgcagcaagagagtgtacattattataattataagttggtatatatgtagttgctaaaaaaaaaaaagagtgtacaatattttctgaagaagcatcgagctggttaatatttaagacccaccaaaacctaccaacaatgttattctcatctctaagcaaaagtttgatctcatctttttttttaattttttttttgatgggtcctcttctacctctgcatctccacgtgctatacaagtggcctcgctgtatgtattatttaccactctcttattgttactaaaaacttgaatgtcacttgaatgtcacttgaatgcaaactatatatttaggtgaataccagatcaaatagcaataaataaaccaacaatttatgctaattaaaaacttgaaaaaacactttccattacctatgattttttaatccaatcttggggtttgatgcccataaaacgaagtcgaaaagagaaaagcgaccttaattgtaataaatgcagctattgacttctctatcaacttcaagtcttcaagtaactacaaatttaataatctccttagcttatcttagagaagcacaaaacaaaagggtctacgcttagtcttcctagattcttgatttgagtcttgatggccacttgctttttatgtctcaatcctaagagttgatacttacttagtattaatcaggtttcacattatctcagacctagcttgcatttttgatacaaacatgtcatgcaatacacataagcaacacgtaccgagtcattgattgaaaaacatgacctaaatagtaatacggactgagagagagtgatgaatcatttcatatgggagacagctttctcatacgcgtccatgcctttgcatgaaagattaaataattcaactctttcacttatcttattttaatttactttgcagaattccaagttttattgcaatcaccaggggtattaaatgggatagtgtaaatgcacctgcaacacatcaactaaccacacactcctccacctgtttgtatttacttcaaaaacttaattcaaaaatccctttgcttctttccttccctctatttataaaccctagtatccggtttttattctaccacacaataccatttgcaacaaacttctctctgaatctcagtgaattctcataaa

SEQ ID NO: 9 - DNA, 2546 bp, Glycine max
aaaatatattaaaagcgtgagtttatttgtttatactttttgcaatatctatatttttaataataaattaagatcttcaattttattatacaatatttcaagattaattgaaacattttttttttcaattaattcccgtccaaaattttcaattgtctaattattatgactgcttagtcttattaataaaaataataataaatgatgtatcatatcatattaagatttatcaactataatttaaattaaaataagtgtttttttaaaataaaataaatgattttataatttttttgatgcatttgtttaattttttatttaaaataagtaattttttgttttcttaaaaccaaccctatctgcttaatcatttttctaaattttttcaaaaaatttaaacaaattagttcataatattttatgactttaaataattcagtaccagcaactgcctcattgactttgcacttgccactgtcctgcctttgcacgaaaaataacatataaataacgcgtagcactgttttctatatctaaattagtctatataaaacataataattacataaatattcggagattttataaacaccgacaaaaaataaagtttaaagtttgtgatttttatgtcaatttctttttattcataagaattgaactcaaatataaaaaaaatttataacaacgtacaactaaattagactcattgatatttttatgtgaaatttaagtttaaccaaacaatatttatctagatatatgcataaagaaagagttttttttttagtttatacttagaccaatttttattttattttttatggaaacttagaacagatgttaatgagcagaaatatcaattatgaaataaaaatacaagtaattaatattttattttagttcttatagctcaattttttaataacacttttttggtccttgttctctaaaattatttaacgtaattacatttagatcttttaaaagtgttacaaaactgcaacggatagtgtaaattaaaaccgctaaaaagagatttgggtaaattttaatggtcataaataaatacaacaacaacgccttatcccactaggtgagtcggttacatggatcaacttccgcctaatcgtcataaataaataaagaaaagaaaacaagactttgttgtgccatcaaccatggccaaggcagaatcacgcgtgacaaactttcataaacgaattgagaaccttattggcattgggtcagagccatcggcgactgtgcttgttttgttgacggatttacatcatcaattccagttttgtaacaattttgaagaatatggatgtttgcattaggcaactttagacatccaataccaaaaggtttaacaattgtaactatatggaccaaaactcctattttaaacaataggtatcaaaagctaattaaacttttattaaaatagcaagcctaggaagcatacgtgtgtatatactaaaattgctgcatgagtgaactacacaaattcaatataattgttcaccatacttcagacaaaataatgttggcccagtcccatttaatgtaagactcaaaatctatgccagttgacccgaaccacacacaaacaatggtagaaatttggagtacgtatattggccacagtagcctactcaactgaaaagcaaccaacctatgaactttgctagctgtttccaagccatagcaattaaacttttccccttttacttttattttcttgaaatttttatgtaccaaggtgggttggaaatttcaaattggtaaatcaggttaattcctttctattagctaggtgcactcaatcttccatgtttatatacactataacattttatacagcatcaccttctgtatgtctatttattaatacagaaaagcatacacatactatgtattgattgccacagcctggtacaatcagccacaactgtttctcaaagtaacttgtatattgatattcatttatacctaagggtatgtctctatcctgctcccacaaatgtgggggaactgtgttgtagatttcactttcaagcgattgatattatatgttcaaggtaactcccctaattaatatattgaatgagacaatttgtgtaatgctaaataaggtttctatatcctaaacttctttagagtaaacatatgctaagaaaatggggtgtaccttcaattagtaccaaatttgcacacaagttgcttaagcttaattttgaaaaaaaataaaagggtttggagagagaggatatttggatgtattagacatgtgctcaaggttttttcagaaaatttcaggctatattacaagaagtagtgaattaatatcatgagtaaatgcaccctgcaaaacatcaactaaccacacactcttcccacccgctaatatttacttctcacttctgtgaactgttttatattccatgctttctcccttccccaaaccacacttcaaaatcctctggtaacccttattttatctattctctctctttcttttgtgttctaagcagctagaagca

SEQ ID NO: 10 - DNA, 2500 bp, Glycine max
aaaatatattaaaagcgtgagtttatttgtttatactttttgcaatatctatatttttaataataaattaagatcttcaattttattatacaatatttcaagattaattgaaacattttttttttcaattaattcccgtccaaaattttcaattgtctaattattatgactgcttagtcttattaataaaaataataataaatgatgtatcatatcatattaagatttatcaactataatttaaattaaaataagtgtttttttaaaataaaataaatgattttataatttttttgatgcatttgtttaattttttatttaaaataagtaattttttgttttcttaaaaccaaccctatctgcttaatcatttttctaaattttttcaaaaaatttaaacaaattagttcataatattttatgactttaaataattcagtaccagcaactgcctcattgactttgcacttgccactgtcctgcctttgcacgaaaaataacatataaataacgcgtagcactgttttctatatctaaattagtctatataaaacataataattacataaatattcggagattttataaacaccgacaaaaaataaagtttaaagtttgtgatttttatgtcaatttctttttattcataagaattgaactcaaatataaaaaaaatttataacaacgtacaactaaattagactcattgatatttttatgtgaaatttaagtttaaccaaacaatatttatctagatatatgcataaagaaagagttttttttttagtttatacttagaccaatttttattttattttttatggaaacttagaacagatgttaatgagcagaaatatcaattatgaaataaaaatacaagtaattaatattttattttagttcttatagctcaattttttaataacacttttttggtccttgttctctaaaattatttaacgtaattacatttagatcttttaaaagtgttacaaaactgcaacggatagtgtaaattaaaaccgctaaaaagagatttgggtaaattttaatggtcataaataaatacaacaacaacgccttatcccactaggtgagtcggttacatggatcaacttccgcctaatcgtcataaataaataaagaaaagaaaacaagactttgttgtgccatcaaccatggccaaggcagaatcacgcgtgacaaactttcataaacgaattgagaaccttattggcattgggtcagagccatcggcgactgtgcttgttttgttgacggatttacatcatcaattccagttttgtaacaattttgaagaatatggatgtttgcattaggcaactttagacatccaataccaaaaggtttaacaattgtaactatatggaccaaaactcctattttaaacaataggtatcaaaagctaattaaacttttattaaaatagcaagcctaggaagcatacgtgtgtatatactaaaattgctgcatgagtgaactacacaaattcaatataattgttcaccatacttcagacaaaataatgttggcccagtcccatttaatgtaagactcaaaatctatgccagttgacccgaaccacacacaaacaatggtagaaatttggagtacgtatattggccacagtagcctactcaactgaaaagcaaccaacctatgaactttgctagctgtttccaagccatagcaattaaacttttccccttttacttttattttcttgaaatttttatgtaccaaggtgggttggaaatttcaaattggtaaatcaggttaattcctttctattagctaggtgcactcaatcttccatgtttatatacactataacattttatacagcatcaccttctgtatgtctatttattaatacagaaaagcatacacatactatgtattgattgccacagcctggtacaatcagccacaactgtttctcaaagtaacttgtatattgatattcatttatacctaagggtatgtctctatcctgctcccacaaatgtgggggaactgtgttgtagatttcactttcaagcgattgatattatatgttcaaggtaactcccctaattaatatattgaatgagacaatttgtgtaatgctaaataaggtttctatatcctaaacttctttagagtaaacatatgctaagaaaatggggtgtaccttcaattagtaccaaatttgcacacaagttgcttaagcttaattttgaaaaaaaataaaagggtttggagagagaggatatttggatgtattagacatgtgctcaaggttttttcagaaaatttcaggctatattacaagaagtagtgaattaatatcatgagtaaatgcaccctgcaaaacatcaactaaccacacactcttcccacccgctaatatttacttctcacttctgtgaactgttttatattccatgctttctcccttccccaaaccacacttcaaaatcctctggtaacccttatt

SEQ ID NO: 11 - DNA, 2829 bp, Sorghum bicolor
tctcctccgactctggcctttgtgtgcgtctggactctggagtgaatgctaatgaggtttagtagacgaggtgctgtgcagatggaatggctactcacgctgacatttttcaggtgagagatcagagttggcaagggacgaaggaatggaggttgggatgggatgggatgggatgggatgggatgggggttgagagggactgacagcacgccaagctagctgaattaagcaaagttaaataagcttatgttggattagtagttggcatgttgggcaggaaagcaatccaggttaaaaattgcttgagggttgcaacctgcaaggctttgcttcagagtggctcaaatttgggtaggttttgatggcactcttttgattttgacaccaaatctttctcgcgacattaactatataatttcctattttaaccactttttagaaatgaaaattattagcacaataaagaagcatttgtaatgcgatatttttttttctgaattctcaagttttttttagatgaagatccttcaaagttgaaatttgttagtaccaaataagcccataaaattggaatgagcttaacgtgaatattccccggacaacctagtcatgacacttgttttggcagagtgaggacccatggtgtttggcattgcagcacagtaccaatctgccactgcctgatgagtgatgatacaagagcatcatcgaaaagcaacagtagatgacaccaggttttggaagggcagccagcagctttctgaccaccaccagacgtatatgaaacaaaagcaatcaggagagcatatcaggtttggtgagaaaagttgtgttaacaaatgaagactggaattccttgactgatcgcaagatgctaccagcagcaaacacttagaatgtaagctacaggcgtgtcaggagctaaagttttgcagataggaggtggctctcagcttctctctccgttgccttcaagtgaagcctcggcaaaaccgggcatgaaacacgcatcgcccgccccaattccttgtgcagtccaaaaggaccagaaccatttcacagtttcacagttgcattgacaggaagtaattcgaagacacgacataccgacgccagtaacaatataccataaaaagcatgggttgatgggttggtcatccaaacagaagattagctgataaacagacaaagggatgtgaaaacgaaccttttatggtagcaggtagcgatggcaatgctctatcttcttttgcagattttctcatgaatatcactgctaaagccagttttcatcaactccataaatcgaaagcgaaggggcataacatcagttcctccatactttctacccagtttcagtatttttgtgcggtcgtagctaaccgcagggagcattcttttggcacattcaactattggaattcgatgaccatgccaaacatcttaaaaccttccatcaaccgaaagtacaagtacaacatacaacggatatagatggaaactttcgttcataaagtttggtatcggcaatgtatttactaccacttaacagatgcatctctggcatccctgcagtaaagaagcagtaataggaacagaagaaaggttttacaaaatctcacgggtatcatgatcatcagttcattgccaggtgtgaccatagataaaccacagcaagatgtaaccaggatcatgcagtcccgcaccagtaggctaagtgctcgtccttgcgagatgtgctaaagagcccaccacatttcaggcagatgaagctgctcccatcagcaaacgcatccaggatgatctgcttccttccactctcagcaagaatgcaggcctcatcagaattcagcatatcgacagggtctgacccaggtccttgtgaagggttagtatttgttgactgagcctctgctatggcacattgggcaagcaaagaggcaagctcatcaacactaggagtggcctgcaatctctgcgcatagagttcacgcgcacggttcattgtctgcatgagcgcttgttcaccaccttgagatcttatggccaggagaacctgcatagtttcataacatgagaatcaatataacagatacagatgaatgggcatgaaatgagacaaatgagtctcaacgaaacaagataaagttcaaaaggttaataattaccacaaggctcatcattgggatctatacgaacaaaattgaaacagccttccagaaggaatcaaaatagaaattatgcatttcaatagaccagaatgcttgtcacattaccaatgtttgattcattaccagaacaaatcctacagtgttattatgagggacacatcaatcataagatcccacaggaaacagctaaggcataatcttatattgcgtaaatgttggtctaaaaaaatcagttacactaacataggcacatagctatggtgcaggcaggaagcactaatgacagagtgtggtgttgcagttgagaagtaattagcctactactccaatccacagagaagacgtgcatttcattcgatccatgtgatacatcaggtaatatgctatacatgtctaatccaaacaagatacggaaattccaatttaaccatcgcacactaatacatatagagaaagatttgtttaggcctatattgccctgtactcctgtgtaaatttagtacagtatactcaaataattttatgagggtaccaaacactaattgtgggctgtggctttcttcttcaacttttcccaaaccaaccttctacttttacccttactcaccaatataagggctcgacggtcatttttaacaggtcaaatccaaaatgattg

SEQ ID NO: 12 - DNA, 2567 bp, Oryza sativa
aggtagcataagaccatcatctttttccctttctaatatattatactacctctatattttaatgtatgacgccgttgacttttcgtccactatttgaccattcgtcttattcaaaaaatttacttaattatcatttattttattgtgacttgattcaccatcaaatgttctttaagcatgacataaatattttcatattttcacaaaaaatttgaataaaacaaatagtcaaacattagtaaaaaaaatcaatggcgtcctatattaaaatacggagggagtagtttttctaaagtatcctgtgaatcacacgcgcatatgtagcttgcatagttacacaaaatatgcctcctttaaatgccggagctaccaaaatgggctcataatagcctgaaattaagtagtcccttcaccgacaaaacactagttactactgtatcatcaacaacgacctgaatttacagtaggggagaaacagcttgaatataagctgaaataagttgaacccataccatcatcgctagtgaagagtttgattgcagataattagttatgcttagtataaaatgcaaaaatccatctgatctataacaataggtaaataaatcacatctctaatttatttacccatgctggttctttcagaaataatatttaaatactttgaaagttgcgttgaagacagtcggcccggatattaaggttcaactttatttcttttttcatcaattagtttatgcaattctgcccaatgatattgttactagtaaattttacagacagtagccaacactgtggatttatttattccataacccatgagagagatgtgataatatgcacacactactaattcagtacagtgatttaatatcacttatatctcatcatatcttggatgtcatgtagaataccaagtcaatgcaaaatctattttctttttttttcaccattaaatctttcaccaaatcataaaaaatcttatgtggcggctagctcatttaatcctatgtaaaacatcttaggtcgagtattaggactgtgccaacagaaatactatgtgctagcccagctttcaggggcccaacaatcaccaaagtaactctgcccttcggaaaattaaaggcagccactcagacacacagtgatatccagcaaatgcacgacggatcacatggagtttcagccccagggccaatcacatcttgcgcaagtacagccgttgctggtatcttcaaccattcctctattatctcctggcctggtcctgctcagctgcaactgtaacggttagttcagtcccatacttcttccgtttcacaatgcaagtcattctaccatttttcacatttatattgatattaatgaatctagatatatatatttgtctagattcattaacatcaatataaatgtaggaaatgttagaatgacttatattgtgaaatggagggagtatgtacgtatggtttcagagagttcgactgttccagaagttaagggcaatagacagttggatgcaggctactagtcattacctggtaattttctgcctttttttgtggtcattgtaagtaattcttgacaggagatcacacatgcatagctccatttcatctgcaatgtcagacgctgtcaagattaaggagtaggagttttgtttataggagggacgaaaatgtgagtgatggatagcatgatgaaatcgcaggtgcgatattgatgaatgactgcagcagcattacactaattgctatatatattttttatttaagagcagcaaggtctgtttgtaactaaaacagaaatgttttcaattaaaaaaaactaacagcacaaggtctacagcataccaagtaaactaacgctagctagaagcagccagatagatcagaaaaactcgaaaactttgcagcacaattctgtaatgtaatgtgctgataatgtatagcatgaaagactgcggcacaaatcagttccaagaaacttacaagaattaacaagcggaattagaccaaagcatcgctttttacacaaaaacaattgtaaaatcaaatttggtgcttccacataacaactgggccagggaatcttaccatactgtgcttccattaaattgagaaattcaattttgccaccacagcatgaaatccagctcgaggcatggttaagtgtactgagtaggtggcaagcaccgatccccattaaatcagcagactttcggggaggaaatccattctgcatggaaagaagactgccaatatccatggaagctaaaagtgccatggcctcgctctaacctacaaatttggacacagatttgagttaaagaactcacaatggaagcttcatcatgtgaattgaaagcgagcagatcaccgtcatgctgaactagctggacgaatcaaaccattaaatgatagacaactactaacagtgtcaatggaactgtagagcatctttcgcatgtatatataggcgcacaaaggcaattcagttcatcagctcaagcacctcaaccagttcagtcatccattctgtcttctctgcagatactgagagccaag

SEQ ID NO: 13 - DNA, 2500 bp, Oryza sativa
aggtagcataagaccatcatctttttccctttctaatatattatactacctctatattttaatgtatgacgccgttgacttttcgtccactatttgaccattcgtcttattcaaaaaatttacttaattatcatttattttattgtgacttgattcaccatcaaatgttctttaagcatgacataaatattttcatattttcacaaaaaatttgaataaaacaaatagtcaaacattagtaaaaaaaatcaatggcgtcctatattaaaatacggagggagtagtttttctaaagtatcctgtgaatcacacgcgcatatgtagcttgcatagttacacaaaatatgcctcctttaaatgccggagctaccaaaatgggctcataatagcctgaaattaagtagtcccttcaccgacaaaacactagttactactgtatcatcaacaacgacctgaatttacagtaggggagaaacagcttgaatataagctgaaataagttgaacccataccatcatcgctagtgaagagtttgattgcagataattagttatgcttagtataaaatgcaaaaatccatctgatctataacaataggtaaataaatcacatctctaatttatttacccatgctggttctttcagaaataatatttaaatactttgaaagttgcgttgaagacagtcggcccggatattaaggttcaactttatttcttttttcatcaattagtttatgcaattctgcccaatgatattgttactagtaaattttacagacagtagccaacactgtggatttatttattccataacccatgagagagatgtgataatatgcacacactactaattcagtacagtgatttaatatcacttatatctcatcatatcttggatgtcatgtagaataccaagtcaatgcaaaatctattttctttttttttcaccattaaatctttcaccaaatcataaaaaatcttatgtggcggctagctcatttaatcctatgtaaaacatcttaggtcgagtattaggactgtgccaacagaaatactatgtgctagcccagctttcaggggcccaacaatcaccaaagtaactctgcccttcggaaaattaaaggcagccactcagacacacagtgatatccagcaaatgcacgacggatcacatggagtttcagccccagggccaatcacatcttgcgcaagtacagccgttgctggtatcttcaaccattcctctattatctcctggcctggtcctgctcagctgcaactgtaacggttagttcagtcccatacttcttccgtttcacaatgcaagtcattctaccatttttcacatttatattgatattaatgaatctagatatatatatttgtctagattcattaacatcaatataaatgtaggaaatgttagaatgacttatattgtgaaatggagggagtatgtacgtatggtttcagagagttcgactgttccagaagttaagggcaatagacagttggatgcaggctactagtcattacctggtaattttctgcctttttttgtggtcattgtaagtaattcttgacaggagatcacacatgcatagctccatttcatctgcaatgtcagacgctgtcaagattaaggagtaggagttttgtttataggagggacgaaaatgtgagtgatggatagcatgatgaaatcgcaggtgcgatattgatgaatgactgcagcagcattacactaattgctatatatattttttatttaagagcagcaaggtctgtttgtaactaaaacagaaatgttttcaattaaaaaaaactaacagcacaaggtctacagcataccaagtaaactaacgctagctagaagcagccagatagatcagaaaaactcgaaaactttgcagcacaattctgtaatgtaatgtgctgataatgtatagcatgaaagactgcggcacaaatcagttccaagaaacttacaagaattaacaagcggaattagaccaaagcatcgctttttacacaaaaacaattgtaaaatcaaatttggtgcttccacataacaactgggccagggaatcttaccatactgtgcttccattaaattgagaaattcaattttgccaccacagcatgaaatccagctcgaggcatggttaagtgtactgagtaggtggcaagcaccgatccccattaaatcagcagactttcggggaggaaatccattctgcatggaaagaagactgccaatatccatggaagctaaaagtgccatggcctcgctctaacctacaaatttggacacagatttgagttaaagaactcacaatggaagcttcatcatgtgaattgaaagcgagcagatcaccgtcatgctgaactagctggacgaatcaaaccattaaatgatagacaactactaacagtgtcaatggaactgtagagcatctttcgcatgtatatataggcgcacaaaggcaattcagttc

SEQ ID NO: 14 - DNA, 2602 bp, Populus trichocarpa
aacagcctgtgctgtcaaagagaaaccattgtgtattttcttttcattacaaaatctaccatcttactcactagtacaagatctaaatactccaacaagagcttgatcttgttttcaatggtctggtgtaagacaccattaatttatttgaaatggggatatgagatataatcaaatagtggaggttgtgggctagcagggctcaaatctttatggtgtattggaccaaacaaaattggggcaggatatcattgttcttgggctcaatatttgttagcttgtccgatgagagaatgaataggaaggcaccccccccctgtgtctcttctcttccagatttaataaattagaggaaaaaaacttaatgtgccgctcgggaaatgaatcatttctagtggtttaagtcgggaccagctgaacggagtctctgaaaaaaaaaaaacgtagtcctgaattcaaacagcttaaagtctaagagataatgaaacacggtgagggttcaatcccatggcatggagcaagttgagacatgggttttgatcagttttattgaggttggaattgaatgtcacattcatcactcggggatgttgcagcaccagatggccttacaggaaaatcatgtctatgtgcttttgagcctacttctatagtttaatctcagcttgtcaaatgaagtcaacttgatcctacagtatcactgtatatgaacttgttctataatcttgtcatattggtggtgaattttttttctaatgaattttgtgaagaccatgttataaaaagactcctaacaatgcctagatcaccacaataaaatggcatggtgaagaaaaaaataaaattatctttaatatggcgagaaacatacttaaaaccaagaaaatgccaaatgaattttgggttgaagttataaattatgttatttacttgttaaataggttttctatgaaaagcttaaatgacatgactctattataaaaagcatgcatggaatggaagaaagtcaagtgttactcatttgaaagtaattagaagcattgactatatgcatgcagatgatcaagtaaggaccaaattagatgacaaaagcaaaaaataatctttgtgagctataatcaaaagtcaaaataatacaagtttcacaaccctaataaataaaaaatgatgattaatagaaatgtcgaatttgatgaagaaagagcatgaaattagaaggtagacgatgttgagaagtatgaatttctaccagtttttgatgaagagatataaagatcatcaataacttgttacacctccacaatcatcaataaactcaacttcacctttatcctcttcttcttttagtagaagttccagtagtggcagctcacttagttaatatagaaagatgaagagtcttgatgacttgtataagataattaatccaattgatgatgatctatcactatattgtcatcttgctacatgtaaatctttagtgtttgtaaaagaaataaatgatgaaaaatagagaattgctataaataaagagattgcatcaactgagaagaatgacacatgaaaatttgttcctagaccaaaaagaaagaagacaataggctaagaagaagcaacctatagtcacattattaacttgagaagatgaatatgtatctactacaacaagtgtttgtcattccatatggctaagaaaattattgaaagagttatgaatgccacatgagaagcctacaaaaatttatataaacaactcattagtcattgctttaactaagaatccaatatttcataactgaagtaagcacatacacacaagatttaatttccaataagattgtattacaaacaagaaagttgaagtcaaatatataaaaacacaagatcaagttatagatatttttataaagccactcaaatatgatgtttttgtcaagatgagaaatatgctatgagttataaagaaatcaattttaagaggggatgttgaaagtaaactagattttagtttttttgcaaaatagaagaatcggtcgatcggttcagaaacaattaaccaataaagacgacataatacattttcttatttgcctagaacctgaggtttataaataaaattttaatctaaggaataattaatatatgtaaagagaaaatctaaggaataataaaattgtttttttattgaatcctcttcttgttttttagttttacttattattttgctgttaataaactcctgccacacttattattattttttttttccaatataataattcatttcgtagtaaccttggcaaaacctccatggcaatggtggcaattcacacatcagagttcttaaaacgagagaacaatccattagcaagagtgagcttgggcatgtggcgggggttggattaattgcattatcgcatcagtgcaagtcattaatagcacaaattaatgctccggcaacaaatcaactaaccacatactccttcacctgctaatatttacttcactctgtcaactctatataatccccgctttcttcactgaagaatgcacctttcagttatatcccaacttacttctagtgttctccaagaatattgag

SEQ ID NO: 15 - DNA, 2500 bp, Populus trichocarpa
aacagcctgtgctgtcaaagagaaaccattgtgtattttcttttcattacaaaatctaccatcttactcactagtacaagatctaaatactccaacaagagcttgatcttgttttcaatggtctggtgtaagacaccattaatttatttgaaatggggatatgagatataatcaaatagtggaggttgtgggctagcagggctcaaatctttatggtgtattggaccaaacaaaattggggcaggatatcattgttcttgggctcaatatttgttagcttgtccgatgagagaatgaataggaaggcaccccccccctgtgtctcttctcttccagatttaataaattagaggaaaaaaacttaatgtgccgctcgggaaatgaatcatttctagtggtttaagtcgggaccagctgaacggagtctctgaaaaaaaaaaaacgtagtcctgaattcaaacagcttaaagtctaagagataatgaaacacggtgagggttcaatcccatggcatggagcaagttgagacatgggttttgatcagttttattgaggttggaattgaatgtcacattcatcactcggggatgttgcagcaccagatggccttacaggaaaatcatgtctatgtgcttttgagcctacttctatagtttaatctcagcttgtcaaatgaagtcaacttgatcctacagtatcactgtatatgaacttgttctataatcttgtcatattggtggtgaattttttttctaatgaattttgtgaagaccatgttataaaaagactcctaacaatgcctagatcaccacaataaaatggcatggtgaagaaaaaaataaaattatctttaatatggcgagaaacatacttaaaaccaagaaaatgccaaatgaattttgggttgaagttataaattatgttatttacttgttaaataggttttctatgaaaagcttaaatgacatgactctattataaaaagcatgcatggaatggaagaaagtcaagtgttactcatttgaaagtaattagaagcattgactatatgcatgcagatgatcaagtaaggaccaaattagatgacaaaagcaaaaaataatctttgtgagctataatcaaaagtcaaaataatacaagtttcacaaccctaataaataaaaaatgatgattaatagaaatgtcgaatttgatgaagaaagagcatgaaattagaaggtagacgatgttgagaagtatgaatttctaccagtttttgatgaagagatataaagatcatcaataacttgttacacctccacaatcatcaataaactcaacttcacctttatcctcttcttcttttagtagaagttccagtagtggcagctcacttagttaatatagaaagatgaagagtcttgatgacttgtataagataattaatccaattgatgatgatctatcactatattgtcatcttgctacatgtaaatctttagtgtttgtaaaagaaataaatgatgaaaaatagagaattgctataaataaagagattgcatcaactgagaagaatgacacatgaaaatttgttcctagaccaaaaagaaagaagacaataggctaagaagaagcaacctatagtcacattattaacttgagaagatgaatatgtatctactacaacaagtgtttgtcattccatatggctaagaaaattattgaaagagttatgaatgccacatgagaagcctacaaaaatttatataaacaactcattagtcattgctttaactaagaatccaatatttcataactgaagtaagcacatacacacaagatttaatttccaataagattgtattacaaacaagaaagttgaagtcaaatatataaaaacacaagatcaagttatagatatttttataaagccactcaaatatgatgtttttgtcaagatgagaaatatgctatgagttataaagaaatcaattttaagaggggatgttgaaagtaaactagattttagtttttttgcaaaatagaagaatcggtcgatcggttcagaaacaattaaccaataaagacgacataatacattttcttatttgcctagaacctgaggtttataaataaaattttaatctaaggaataattaatatatgtaaagagaaaatctaaggaataataaaattgtttttttattgaatcctcttcttgttttttagttttacttattattttgctgttaataaactcctgccacacttattattattttttttttccaatataataattcatttcgtagtaaccttggcaaaacctccatggcaatggtggcaattcacacatcagagttcttaaaacgagagaacaatccattagcaagagtgagcttgggcatgtggcgggggttggattaattgcattatcgcatcagtgcaagtcattaatagcacaaattaatgctccggcaacaaatcaactaaccacatactccttcacctgctaatattt

SEQ ID NO: 16 - DNA, 2134 bp, Setaria italica
tttggaccatgtttagttcctccaaaactcccaactttagcactatgcaaaaagaagattctccatcacatcaaacttgcggtacatgcatggagtactaaatgtagacgaaatcaaaaactaattgcacagttttgttgtactttgcgagacgaatcttttgagcctaattagtcaatatttggacaataatttacaaatacaaacgaaacgctagtgtgctacagtgctacaacagtaattttgcacctccaaactttggccaaccaaacaagatcctatatatcggagttcgttctacgacgacttgcactacatgccccgtttaaatgctcagctagtcagctaccaaaatgggctcataaagtcataatagcagcggactccttccaccgacaaactcccaccctcctctagtcacccgcagcatgccaacatgaatttcagctgaaacagagctgcaccaccacccaagcacgcaaacaaatttgagcaagtaaaattaattgcaccgcaagaacagtaaatgcaagtactgttagtatattcggccaatgagaaatgaacgcaggagagatgtttttcgtacatgtgctttcttgaaggacccctcgcatcaccactcatcaatggaactgcgtgttcaaaaatggcggccacagagcagcagccgctagcttccgtctgtccgggcccccgaactctctgtaaagctccggcagatccacaagagatcacatggcagcccgatctccccggggccaatctcctcttgagcaagaccagctgctggcctctcgcgtccttgtgcttcctccttgattggaaggcagcctggtgttaaaggtgagagcacagtaaatttggtttggtactccttccgttccaaattgtaggtcattttaattttttagtttataaatattattatgcacctagacacatgtttctgtagttgtcttcctgtaaggaaaaggaccttgcaaattgaacccatgtactgatggtcatttctgaacttcgcacatgaggtcagtacggtcagtccatgtcgtagtaattccgaaggaaactgcacatgaatgactcatgtatgatgtatattagtaaaatgctgccatgatgtgaaccagcaatacgatagcatgtgcgacgatgttgtacaaaacagaggaggcccttgtaaaagacagacggcattacattcaggggctaaaaacatggtaccatacaggtgagatatgatggatgaatgcgggcagcagcccactgcgactacagtatacgcactaaaacctcggcagatgcaatcagaataatacacagaaacgcagaggactatcagactatgcaccagtattctgacagagtataagcacacttttgaatatgcagcagtaaaagatgcagtgaaatcagttttaaagaagttaccagattttccagtaaagatatgagacttgtgatgaaatctggccaaatcctgtgcctttcagttggatcacaaaataccttcagccgctccatagttattcagaacaaactcgagttagatccctcgaccctctgtttcgctggaccagccaaacccatgtttccattaataagttcgatagattcggtatttcaattcagggatcagatcgccgaatccagctcgaggtatagttaggtacactgagtaggtgggaggcaccgattccgattaaatctgcagtctgggaatagaaaagatcctcattttctgtcaaaagatgcctgcccaaaatccacgaagctctaagctatcacagttcacagccttagtgcccttttcctttttttttgcacaatatttgtagaaaagaatttgggctaaaatactcagtaccttcattatgctagttgagagcaagcagatcactgccgtgacaagctggacaaaccaagatcattaaatgttggccaactactaacagtgtgatgaacatgtacacatctttgcacgcaatagcttcaatggaactgtggagcactgctcgaatgtatatatatgtgcctgaagggaactcagttcatcaactcaagcatctctaggttctcaaccagttcttaggccacatattcagtcttgtctgtagacgttgagagcaag

SEQ ID NO: 17 - DNA, 2056 bp, Setaria italica
tttggaccatgtttagttcctccaaaactcccaactttagcactatgcaaaaagaagattctccatcacatcaaacttgcggtacatgcatggagtactaaatgtagacgaaatcaaaaactaattgcacagttttgttgtactttgcgagacgaatcttttgagcctaattagtcaatatttggacaataatttacaaatacaaacgaaacgctagtgtgctacagtgctacaacagtaattttgcacctccaaactttggccaaccaaacaagatcctatatatcggagttcgttctacgacgacttgcactacatgccccgtttaaatgctcagctagtcagctaccaaaatgggctcataaagtcataatagcagcggactccttccaccgacaaactcccaccctcctctagtcacccgcagcatgccaacatgaatttcagctgaaacagagctgcaccaccacccaagcacgcaaacaaatttgagcaagtaaaattaattgcaccgcaagaacagtaaatgcaagtactgttagtatattcggccaatgagaaatgaacgcaggagagatgtttttcgtacatgtgctttcttgaaggacccctcgcatcaccactcatcaatggaactgcgtgttcaaaaatggcggccacagagcagcagccgctagcttccgtctgtccgggcccccgaactctctgtaaagctccggcagatccacaagagatcacatggcagcccgatctccccggggccaatctcctcttgagcaagaccagctgctggcctctcgcgtccttgtgcttcctccttgattggaaggcagcctggtgttaaaggtgagagcacagtaaatttggtttggtactccttccgttccaaattgtaggtcattttaattttttagtttataaatattattatgcacctagacacatgtttctgtagttgtcttcctgtaaggaaaaggaccttgcaaattgaacccatgtactgatggtcatttctgaacttcgcacatgaggtcagtacggtcagtccatgtcgtagtaattccgaaggaaactgcacatgaatgactcatgtatgatgtatattagtaaaatgctgccatgatgtgaaccagcaatacgatagcatgtgcgacgatgttgtacaaaacagaggaggcccttgtaaaagacagacggcattacattcaggggctaaaaacatggtaccatacaggtgagatatgatggatgaatgcgggcagcagcccactgcgactacagtatacgcactaaaacctcggcagatgcaatcagaataatacacagaaacgcagaggactatcagactatgcaccagtattctgacagagtataagcacacttttgaatatgcagcagtaaaagatgcagtgaaatcagttttaaagaagttaccagattttccagtaaagatatgagacttgtgatgaaatctggccaaatcctgtgcctttcagttggatcacaaaataccttcagccgctccatagttattcagaacaaactcgagttagatccctcgaccctctgtttcgctggaccagccaaacccatgtttccattaataagttcgatagattcggtatttcaattcagggatcagatcgccgaatccagctcgaggtatagttaggtacactgagtaggtgggaggcaccgattccgattaaatctgcagtctgggaatagaaaagatcctcattttctgtcaaaagatgcctgcccaaaatccacgaagctctaagctatcacagttcacagccttagtgcccttttcctttttttttgcacaatatttgtagaaaagaatttgggctaaaatactcagtaccttcattatgctagttgagagcaagcagatcactgccgtgacaagctggacaaaccaagatcattaaatgttggccaactactaacagtgtgatgaacatgtacacatctttgcacgcaatagcttcaatggaactgtggagcactgctcgaatgtatatatatgtgcctgaagggaactcagttc

SEQ ID NO: 18 - DNA, 3000 bp, Arabidopsis thaliana
ttctgtaataaatacgtattagaaaatgatgaagatattagatattctctcgaaatcaagtcgagggccattaaaattgatgattattagaaaaaaggttataaatacttagttggaagacctagctagctaataactaagaaaattaatagaagaaactctctcttattgatatgtcgtcgtccatgcttctatattggatatagttctcgcatatgagtaaatctactatcattaatacaaaaacaataatatcaaacgcttaattagcatttgaacaataaaaatcatttatgtattcatgcataatttagacacacacacacacgcacacgcacgaatatatacatgttgtagtacactagcacttaggtctaaattttgagaactacgcaatatgacaagtaactaaatctttgttaacctaactaatgcgttgttgttgacatagatgaggtacgaaatggttgtaatatgaattcttatacacattagtatatgtggaagccaagtagccaacgaaacacttgcatgtaaatttttttgattattctttacaagcttaaacgttttttatttaacctatagaggtaaaagaaaaacagtgattttggttttgacttatataaaccgaaactctttctatcactctatagagataaatatacaaagaaatgagtaagtttctctcactatagcattaatggagctttagatcatcataaatgcattgcaccctctctatgcgctcatcaataactccttttaaatttcttattgcaactccacctgttcttttccttcctctcttgtcctcttctccttcttcttcttcaacaacaaacttccattgttcttaatacctagctagctcttccccggtttgagattatcccaaaataacaccggttctcgggtaaccggtcggtttttccggagcaaccaacccttttacttctctttatcattgtctcagatcttctgttcttcaaaggcaaaaatgggcataaaccaaagatcattgtgaattagggtttcactgtgtctccaaaagtaagatctctattatcaaaaaagatctttctctctctacacatatatgtatgcatatgcatttgtgtgtatgtatcttaggttatgtttatagatcggatccatattgcatgttgttgagactcttagatcttctatttttttgtttatggtgttttttggttctcaagatctcgatgcctatgatttgtttttttttctagattattttagtttaatttaatttaatgttttttgtgtctttttgcggagacttatgatctaagataaataaagcgttaccaaaaactttcttggagttagcagtttcaaaaggggtttgacgaaatctacttggtggttgtgtcacaaaaaaaagaccattgacttattgtcaacgctttaattaaccctatatactatatactatttttaatcgcttttaattaatcaaccctatatatcctgtattaaactaattaaacttagcctttttcattagttttgttactggaaacggttcgtctttagtgcacaaagaccaaggtcaatttaattctttaataaattcaattgagagatcagaagcttgtgaatctggttctctctctctcttctcttactagcttttgagtcgacaaaagagagagaaaagatcattaaactcgaatccaaaacttcaaccaacaaaagggaaaaaaagaaaaaataactacaaagagatctatctttagggtttcaaaactttcttgagtttcagatcgaattgagtaagtatttatattatttaagtgttcttcttactgtatcatttctgaccatacaccaaactagggtttcttaaagatcataactctctctctctcgcttcttcctacactagatctgtccgatagatctgatgctttgagaagtcttgtgactttcaagattgatttttctttttgtttgtttgtttatatgtacacatacttggagatagatatactctcatatatgttactgtgcatatggatggatccatcttaagtgtgaataaaaactacccaaatctcatttttgtttgtttcttatctcatttgttgtttttgtaaggccgtcattataaatctaaaacaatttatccgttttcgtaaagaaaatcgctttccaaaaaaaaaaactttgaagtaaaaatatcattttgggtctatattcaaatctctcctcatatttccatctcattatttgtaaaattaatatattaggtcattatcatattgattatagagtttatatgttatgttataaagtaaaagttatatatgtaaatattacgtttgtaatatatatatttatacatatgtacgtatacataatttgtatgtatatgtgcctcatttttaacaaatattatcgttaatctttagtttcattataattttttagggatgtatacattatataaatattttatgttatttatatctgaaatttctatactataacatcttagatagttttcatacgtaattaagagttttaattaatagttacataattatgattagatgaatttatctataaattgtatgcaaaaatatatacatatccaaccgaaaaaatggagagtaaacaaaaacctaacaattaatggtttagtacttgtgaaaatgataaaattattaatttaatatatagtttcataacagctagaaataactttcccttaatataattattttcttccatttccataatgattttcttcttcttcattctgtatacatatatgagcgtttcatatataatcttttactaattcgattgtgattttgattttgggcagtggaagatatacttggagaagaaaatcaaatcacgaaaatatattgatcagtgccttgaaggaaaccaaagttgacaactccaaaaatccatttcgttattaatatctaactgagtgatcatagtcaatcatccataaca

SEQ ID NO: 19 - DNA, 6237 bp, Glycine max
taatattattatcagtggagtcacgtaggaaaatgaaagtagaaaaagtgtttgcggagaagaagaacataatgttgtgaaaaattaggattaataatttttttatttaattttttaataactaatgattttgattaatttataattaacttaataactcaattaattataagtatttattaataatctatcagaatgatcaaaatcactaatttataagatttgaggatcaaatgttataattaaaattcaggagacaacaatcataaatttgagaaactagatgactaaaaattacaattaaaatttaggaattaaaatcatggatttgaaaaattaggatgaccaaaattataatttaaccttcttttataagaagaaatttaaaagtctccttgcattaaatatttttttgaaaacattattaattatgaaccatttttctgaaattaggatgaccaataggtagaatattaatatttttttccttttcatatgtagagaatttacagaaatcttattgtgtactatctttacatctataaacaataaaaggtagagcaataaacatatttacagattaattaaacgacataaagacaacaaatatactaaacaaaaagaataaggacatgtttcattactattataggtaattttgaaaataatatataaatttagaataaatatataattattaatttaattaattatttttttaatctttatgaattagttgattgaattttataaaaagatcaaaagggagcggttaatttgtagatgacttgttattcatgagaaactaaagaaaaataagaattaatgatataaatattaatcattcaattcatcttgtatttactaaatcaatcaacaaattaatttaaatcagaaatctgatgttaattaaaatgacattattttctaaaatattgttaaatccttttactattaatgaattatataagaatcaaatttaaataaatataattattgtttagtgactaattttatcttataaaatgagtttaatatttatacactcatagtatacaagagttttacattatcatccaatcatgaattccgtttgaattactttaaaataattatttgaaaagtcaataaatttaatatatatgatgagtttaattaaatgaatatataaaactttttgcataatatcaatatataataattttctcttataaaaatagtatgtaagataattttctctcattatgattatatactaatacatttgttaaaaaaattataataacgatatactgtatcaaaattaaactcttataaaattgttacgaaataattaaatgttaaaatagagtctttctattgtaaatatatttaaatcaatatttaacaccaataaacaataaacattttgtttataaatattttaattatggctaatgttaaccctttttattgtgatccacaaaattatattgtcatgatttttttacgctctcgtattcttttttttttttgacttaattatttttttaacccctgaatttaagtcgtgtattttttttagtctttaaaattttttaaaaaaattctctgaattttgacaaatgatttttttttgacataataaattgatattttatgtcaatttttagtactttgtgaaatttttttagtatttcgtaatagtttcaaaatgaaaatttaaaataaactaatattatgatttaatttacagaatcaatccatttttttgtcaaactcatttcaacatcttgtaaaataagtataataattaatctttactatcaaaactagttttaagcccggcttaactaattattattttagtttctaaattttggatttgtgatttttttagtccttaaaattttaaatttatttctttgtttctgaattttgataaattattctttttagtcagagccatgtaaattgatattttgtgataatttttaactacttaaatttttaataaaaaaaccatcacaaagtgttaaaaaccaccatataatacagtgttagtttataagtaagagattaaaaaataaatttgtcaaaatttaaggattaaaaaaatatttttaaattttagagattaaaaaaatacactccaaattcaagaactaaagcaataattaagttttaattttttaaccaataacctaataacactcaccaattagcaagaccgtgaatacttgttaactttttaatttgaaaggcaagagtagaaggcagtgtaaggggctagggttgagaaatataagagtcacttcactggacctagctcacaaaataaaagttaaagcatggaacgatatcgcgctctaactctcttctattcatgtataaccatttaattaaatttacaccagtcatccctccataaatgcttctacaccctctgcaataacttcatgctgccaaaccctctcccacttgttctacttattcattttatctcttcctgcgtcgtttggttctatctctatttcgctttggcccacactaaactcacaacttccccatcaacaactccttcacttccctaattccccacacacattcttgtttctctgatgacccacaacacatccgtttcagtcaacaacataactaattaaggttcattccactctcaaacgcttaaggccccctcttgcatctacgcattcttaattttagctttgacttgctttgcttagcttagttaatttccgagtgagagaaaggggtaacggctacgttcccccgcattgaaattggttacttgacaagcgttatagtaatcatctgttttgtcaaacctttcacactgactcaacactctacccttattttgtcttttctgatttccctagcattgcaagttttgcgtgtaagataagagtagtaaggccaaggccagggaaagtcagcagtgtcctcttgcaaccttaacataagaatgaatctccagacaaacacttgaaagtgctcgaaatcgatcgatcagagacaaaacagcgacacgaggggcctggatgcttttattatcaatttttgctttgcgtggcggttccataaatcccaattgcaagtcccatcaaactttagagatggaaagcggttgattcattatattgcagtcgtcttcgtggttaatctatcaggtgatcacttccttaatttcttattttctctcataattaaacagaggtacaacaaattttcttttttgagtaaaacagcaagttgattaaatggaaaaactttaacattttattcattctcgatggggagaaaagtcattctggcttagaatttttttacatatatacagttgctattgttatcacatatgttcatcttaatgttttattgccaacaaagtttggtattttagcaatctacaagtatttctgaaaatgtttttttaggtgtgtcatggctttggttgaagctcaccttatttaaatttttttttttgaaaataatctacgtttcatctcgactaaaaataatcacacattaaaatatataagtgagagagacaattcttattccttaagttaatttttaggattaagttagacttctcacattctaagatcttattaatgtgagagacaactctcattctctcacttactttattgtaagaattttattctttctttatttttatgataagaaagtgttaatttttaatgtttattttagagagaaaaaaagtttctattgtgaggcccaggagaaaaataaattccttacctccccaaattggcatgaaatgggtgaggggaaaaatgatctcttactaatttttattttagttttcttaatatatatatctttaaaaatagttaaatataaaacaattttatttttaaagataagtatatttttctattagaatgaaaaatataactttttataaggtgtttggctatttggtgtttccataagcatcgagaataacttaaactctttatcctttttctaaatatgcaaattaaatcaaactcaaggatcatcctataccttttttagttagcatgttattggtataaaatatctacttgttttaccaataatcaattttcatccacaaatcttaaatctaagactttatttatttaaaggaattgagtcaaatataacttcgaccaacatcttggaaatatttatttatttatctaagtaattacaagaaaaaaattctctgcgtttttgttatttccatttatcaaaataacgcatctttgctactctattaatttttttttctttttttctttcttattttttctgtattttatttctaaatcaaatagaacattaatatgtttctatctaatcttttgttacccataataatcataaacttaaaaaaatttctgtgtaaactaaacttgtagttttaaaacaaaaaataaattccatttgtctactcaattaataaataattctaaattatttaatattctctcagtgtttatattttaacatctttaaatatcaaacactctattaacactcttaatttatctctatcattcttttagtatctcattgtctatcatatcgatgtttctctctcttttatttccatctctcaagatatcaattaaatttgggtgtttgaagactttttaccatattaattttcctactttctttttattttttcatcttgctcaatcattcgacttaactgacttgactactttctttttatatggtgagtatttaatgtgttttatattttaaaaacattaaatattttatatttatttttcatttaatacttttttcgtatggtaataatattcttttcatttaatactttttttgtacggtaacacttttttcaatttcaaccaatacaccttcacgtaaaaatattaaaaaaacaattaatttgataaataatttagaaaaagatattagttaaaaaatacatgtaatacttttaatcaataccgattatattttgtctttatactaattaatcaataccgattatatttcctctttaagtctttcactataaattgaattcgagtaatgttgtatgagaaatgcaaggaagacattttttaacaaactcttgatgatttccttaaaaaaaatacttcttttataattgattgaaatttataggaaatcataattttttggaatgctaggaacattctctttggcacactcctttaaagattctttgtatatacgattgactaaagtttattgaacaattttgataggttttaatttttatttaatataaatcaggagagagtatgaaaaataaaatgtaataaaaatgatgattttcattaaattctaaggaaatattaaaaaaaaaagcgttaaagaaagtgatgttaacatttatggtattcactaccaagcacattaattagtaatctttttaatttgagttgtgatagttgttttatccttgtaaaaaaaattctccaataaaaagtattagtatttattttttatataagattcaatttataattttttattttgattatttttaaattaaattgcctctaaataagttattatattggaaaaattaattgagatgagagaatttattatatgtcagaaatacaaatgtatttaatatttacttctacaaaaaataatttaaatacttaattgaatatgttttttaggtacatccttaattgaatatgtttaaaaatttctaagaaatttgagggtaatagttaataagatgcatagttttctttttattattactgatagttattaagtaaaaatatctatatttttcatatttttagatgctaaaagtattggattcttaatatttattattttaatacaatttaaaaatttatagaaagttaatattagaaaaatataattaatttaaaattaagaatagcattgctcatttactattttactaaaaatataaaatattatctgtcaagaaaatattaaatattaactatttaccttaggtagttatgaacattcaatgtattaaacttctaacgtatattatattgattattgaagttgttcaaaaaatattcttaagggcactcgctatagggctacacaaactagcctacttcttgctttcccacatttttgcttccgtcgggcgagttaaatgttttagaattcctggtttggcagagactagctagagaagaaaattgcggcttccgaattatttaagga

SEQ ID NO: 20 - DNA, 6192 bp, Glycine max
taatattattatcagtggagtcacgtaggaaaatgaaagtagaaaaagtgtttgcggagaagaagaacataatgttgtgaaaaattaggattaataatttttttatttaattttttaataactaatgattttgattaatttataattaacttaataactcaattaattataagtatttattaataatctatcagaatgatcaaaatcactaatttataagatttgaggatcaaatgttataattaaaattcaggagacaacaatcataaatttgagaaactagatgactaaaaattacaattaaaatttaggaattaaaatcatggatttgaaaaattaggatgaccaaaattataatttaaccttcttttataagaagaaatttaaaagtctccttgcattaaatatttttttgaaaacattattaattatgaaccatttttctgaaattaggatgaccaataggtagaatattaatatttttttccttttcatatgtagagaatttacagaaatcttattgtgtactatctttacatctataaacaataaaaggtagagcaataaacatatttacagattaattaaacgacataaagacaacaaatatactaaacaaaaagaataaggacatgtttcattactattataggtaattttgaaaataatatataaatttagaataaatatataattattaatttaattaattatttttttaatctttatgaattagttgattgaattttataaaaagatcaaaagggagcggttaatttgtagatgacttgttattcatgagaaactaaagaaaaataagaattaatgatataaatattaatcattcaattcatcttgtatttactaaatcaatcaacaaattaatttaaatcagaaatctgatgttaattaaaatgacattattttctaaaatattgttaaatccttttactattaatgaattatataagaatcaaatttaaataaatataattattgtttagtgactaattttatcttataaaatgagtttaatatttatacactcatagtatacaagagttttacattatcatccaatcatgaattccgtttgaattactttaaaataattatttgaaaagtcaataaatttaatatatatgatgagtttaattaaatgaatatataaaactttttgcataatatcaatatataataattttctcttataaaaatagtatgtaagataattttctctcattatgattatatactaatacatttgttaaaaaaattataataacgatatactgtatcaaaattaaactcttataaaattgttacgaaataattaaatgttaaaatagagtctttctattgtaaatatatttaaatcaatatttaacaccaataaacaataaacattttgtttataaatattttaattatggctaatgttaaccctttttattgtgatccacaaaattatattgtcatgatttttttacgctctcgtattcttttttttttttgacttaattatttttttaacccctgaatttaagtcgtgtattttttttagtctttaaaattttttaaaaaaattctctgaattttgacaaatgatttttttttgacataataaattgatattttatgtcaatttttagtactttgtgaaatttttttagtatttcgtaatagtttcaaaatgaaaatttaaaataaactaatattatgatttaatttacagaatcaatccatttttttgtcaaactcatttcaacatcttgtaaaataagtataataattaatctttactatcaaaactagttttaagcccggcttaactaattattattttagtttctaaattttggatttgtgatttttttagtccttaaaattttaaatttatttctttgtttctgaattttgataaattattctttttagtcagagccatgtaaattgatattttgtgataatttttaactacttaaatttttaataaaaaaaccatcacaaagtgttaaaaaccaccatataatacagtgttagtttataagtaagagattaaaaaataaatttgtcaaaatttaaggattaaaaaaatatttttaaattttagagattaaaaaaatacactccaaattcaagaactaaagcaataattaagttttaattttttaaccaataacctaataacactcaccaattagcaagaccgtgaatacttgttaactttttaatttgaaaggcaagagtagaaggcagtgtaaggggctagggttgagaaatataagagtcacttcactggacctagctcacaaaataaaagttaaagcatggaacgatatcgcgctctaactctcttctattcatgtataaccatttaattaaatttacaccagtcatccctccataaatgcttctacaccctctgcaataacttcatgctgccaaaccctctcccacttgttctacttattcattttatctcttcctgcgtcgtttggttctatctctatttcgctttggcccacactaaactcacaacttccccatcaacaactccttcacttccctaattccccacacacattcttgtttctctgatgacccacaacacatccgtttcagtcaacaacataactaattaaggttcattccactctcaaacgcttaaggccccctcttgcatctacgcattcttaattttagctttgacttgctttgcttagcttagttaatttccgagtgagagaaaggggtaacggctacgttcccccgcattgaaattggttacttgacaagcgttatagtaatcatctgttttgtcaaacctttcacactgactcaacactctacccttattttgtcttttctgatttccctagcattgcaagttttgcgtgtaagataagagtagtaaggccaaggccagggaaagtcagcagtgtcctcttgcaaccttaacataagaatgaatctccagacaaacacttgaaagtgctcgaaatcgatcgatcagagacaaaacagcgacacgaggggcctggatgcttttattatcaatttttgctttgcgtggcggttccataaatcccaattgcaagtcccatcaaactttagagatggaaagcggttgattcattatattgcagtcgtcttcgtggttaatctatcaggtgatcacttccttaatttcttattttctctcataattaaacagaggtacaacaaattttcttttttgagtaaaacagcaagttgattaaatggaaaaactttaacattttattcattctcgatggggagaaaagtcattctggcttagaatttttttacatatatacagttgctattgttatcacatatgttcatcttaatgttttattgccaacaaagtttggtattttagcaatctacaagtatttctgaaaatgtttttttaggtgtgtcatggctttggttgaagctcaccttatttaaatttttttttttgaaaataatctacgtttcatctcgactaaaaataatcacacattaaaatatataagtgagagagacaattcttattccttaagttaatttttaggattaagttagacttctcacattctaagatcttattaatgtgagagacaactctcattctctcacttactttattgtaagaattttattctttctttatttttatgataagaaagtgttaatttttaatgtttattttagagagaaaaaaagtttctattgtgaggcccaggagaaaaataaattccttacctccccaaattggcatgaaatgggtgaggggaaaaatgatctcttactaatttttattttagttttcttaatatatatatctttaaaaatagttaaatataaaacaattttatttttaaagataagtatatttttctattagaatgaaaaatataactttttataaggtgtttggctatttggtgtttccataagcatcgagaataacttaaactctttatcctttttctaaatatgcaaattaaatcaaactcaaggatcatcctataccttttttagttagcatgttattggtataaaatatctacttgttttaccaataatcaattttcatccacaaatcttaaatctaagactttatttatttaaaggaattgagtcaaatataacttcgaccaacatcttggaaatatttatttatttatctaagtaattacaagaaaaaaattctctgcgtttttgttatttccatttatcaaaataacgcatctttgctactctattaatttttttttctttttttctttcttattttttctgtattttatttctaaatcaaatagaacattaatatgtttctatctaatcttttgttacccataataatcataaacttaaaaaaatttctgtgtaaactaaacttgtagttttaaaacaaaaaataaattccatttgtctactcaattaataaataattctaaattatttaatattctctcagtgtttatattttaacatctttaaatatcaaacactctattaacactcttaatttatctctatcattcttttagtatctcattgtctatcatatcgatgtttctctctcttttatttccatctctcaagatatcaattaaatttgggtgtttgaagactttttaccatattaattttcctactttctttttattttttcatcttgctcaatcattcgacttaactgacttgactactttctttttatatggtgagtatttaatgtgttttatattttaaaaacattaaatattttatatttatttttcatttaatacttttttcgtatggtaataatattcttttcatttaatactttttttgtacggtaacacttttttcaatttcaaccaatacaccttcacgtaaaaatattaaaaaaacaattaatttgataaataatttagaaaaagatattagttaaaaaatacatgtaatacttttaatcaataccgattatattttgtctttatactaattaatcaataccgattatatttcctctttaagtctttcactataaattgaattcgagtaatgttgtatgagaaatgcaaggaagacattttttaacaaactcttgatgatttccttaaaaaaaatacttcttttataattgattgaaatttataggaaatcataattttttggaatgctaggaacattctctttggcacactcctttaaagattctttgtatatacgattgactaaagtttattgaacaattttgataggttttaatttttatttaatataaatcaggagagagtatgaaaaataaaatgtaataaaaatgatgattttcattaaattctaaggaaatattaaaaaaaaaagcgttaaagaaagtgatgttaacatttatggtattcactaccaagcacattaattagtaatctttttaatttgagttgtgatagttgttttatccttgtaaaaaaaattctccaataaaaagtattagtatttattttttatataagattcaatttataattttttattttgattatttttaaattaaattgcctctaaataagttattatattggaaaaattaattgagatgagagaatttattatatgtcagaaatacaaatgtatttaatatttacttctacaaaaaataatttaaatacttaattgaatatgttttttaggtacatccttaattgaatatgtttaaaaatttctaagaaatttgagggtaatagttaataagatgcatagttttctttttattattactgatagttattaagtaaaaatatctatatttttcatatttttagatgctaaaagtattggattcttaatatttattattttaatacaatttaaaaatttatagaaagttaatattagaaaaatataattaatttaaaattaagaatagcattgctcatttactattttactaaaaatataaaatattatctgtcaagaaaatattaaatattaactatttaccttaggtagttatgaacattcaatgtattaaacttctaacgtatattatattgattattgaagttgttcaaaaaatattcttaagggcactcgctatagggctacacaaactagcctacttcttgctttcccacatttttgcttccgtcgggcgagttaaatgttttagaattcctggtttggcag

SEQ ID NO: 21 - DNA, 1999 bp, Zea mays
tcggcctgtccattattgtaggaatagctagccgcccatgcaagttctattcagcctgccttttcatcgctctgaccaccatgtcctcatctgcgtgagatgtgctatcaatagttggacacaattcgtcctcaagctacgacggggacagtttgacattaccagagagagagagagagagagagagagatagagtgctagcaataggaggggatgcaaaaacatgtaccacctcaccgttctgtcgtacttccctctgatcaacttcacaacgttcaaatttaggcaaggcgctgtggctgaagtttacaatattctgcaccacctcactgtcttttgtagttccttctgatcagctttaagttgttccaattcaggcaaggcgctgtgggttaagttgacaattgttacctcagcttgatcaacagatgacactttttttttttggtgaagaagtgttggcttccgggtcacaagagtatcctctcctctgtactgtttctgaaacttgttgccttcctgtccattgtggcgattaggccggggttaaaaattcccagtttcgataacgattgctcgttgctgggttagactttgcacagaaatcttccgctcgaggagggggtttagttattaattacccacagtgatgagagtgacgtacgctgtactagaatttttgcgaatgactgacagtaatgacatcatcgtccctgacaataatatccaacatccaacgcccccacacttatattccagtccaggcatattgtatatgaacgagcgagcacgcacggtacgtacgtgtgcggtgtgtccgccggcgcctaccaggacgtagtacaacatcgccatctgagcccatgacgcccgcccagcgccagcgccagcggcacggcaaaagtcgccggcgccagcaagaacagcaggaagcacaggtttcaaagggggcgccgcgagccagggcccaggaccagcagcacgtacagagcgggagtaataaacgctgaaaagctccgcgccctctcgcgcaatcaatggcgacgcgacgcgaactctaccggccggctccgtccgccccagtcggggtccccacgcccccagggggagggtgcctctctcgctcactcacccgtcgccctgcgtgccgaattaatggcggcgaccgctgcgtgcaactgatccgacccgacccgaccagaccccccgcgccgacgaccgcctagctctgcactcaccgggaatcagagaccgaggcgccgcgagtagcagaggcaaccacccgttctttggagtcggagcgtcccggcccggtcgggatccattttctgcacgtcgtcaccactcaccacgcgcattggaaccgccggaagccgcgcgtgtgaaaaagctgctgcttcatggtcatggtcatggcggtcacacagcagcttaatttgttacgctaagtcgctaacagttgagacactggcacaagcagcatggccggcctccggctctcatgagactacttgcctcctgtgccagtgccagccagtatagaaattgagacgacgacgtcgacggcaacaacagccgtcaccaccacgccgcgtctcaatcccgttgggtttcaggcgccataactccagcagtcccgctgcgagtgagggggagccggtggcacggctgggctgcaacgatccgtgtccccccgcgtcctcctccttcctactgtgcggtgccggtgccgctgcccccaattgctcgcgttgcttgcgtcccttggcgaccaagttacatgtataaagccatgcatgaccagagaagaacacacaactgtcctggcctgtccacggtccacacacgccttccttatatcggcgctcacggttctataaaaaaaacacagtacgagcagagcaaggcggccgtgagctgagctgagggaaggacgacgtacggctcagttgctagcccggccgccggagctctccgagatctgggccgccagcaacac

SEQ ID NO: 22 - DNA, 3000 bp, Arabidopsis thaliana
attttaagaaattaaatctttttttttggtatctgtgtgttactttttataaatgtattttgaaaagtattatttcaatttatagataaatataattatgactctcaagtggatttttttttcacggtcaattggagtttggctgtgaatcttgtgaataatatcaactaattaagagtcggccgatactccgtatctttgatcactttcacccatatcttgaaatttaccaaatgttttctttcattggggtttctataccttttttttttggttctttctgtaatttgggttttaaagaaaaaacctataattacaaaaaaggttaaaagttaaaactaagcacgttcaaatatgttctttcgagatcccaccttcctgtctatcttataagaagtcgaacacgtgtgctcgttgtgtgaattagagtggttatttcaacatatataattaaactatgtatgtatcataaatacactgaatatgttggagttgggtcttgtggtaggctaacttgttcgcttcactttggtttagtttagccttgtaatcggtggtttcatatactgaaatttttaattttctaatataatccagatgacaaaaaaaaatcataaatacactgcaatggccatttttaaaaaaactttaaacgaaatatatatacatcaccaagtatcaagtaagtaatttggttgttttgatttttcaaaaaaacatttaggtgattcttttaacaaccaatcatatatgtagcaaagattaattatgtcaatcttttaacgtcacttatatagtttagctgtagtattattgtaagccaattgtacggacttcgtaaccgtttcgacaaagatacaaactaatcaatgtttaagatggcataatattccgacttcccctgccactcggtagtactgctgcgccatcctacaagaagcactcgtaaatgagtggttagacggccaaaaattagcaggattcaatccttgattaagagatggttcagataagccctctaggcctctactcgtcacaattcatatattaattgatcacactgcatgaaatgataagatcaagtcaattacctcaaaattaattgaaagataaaatgataaagcaacaagtaatgatcatatatggatgtaacaaccttcttcatccatacgaatatgataattcttttgtcgatcatttgccacatctatttaactaagtattttgtacattaagatcattttgcgagtattcccgcgttcccaacaaaaacgaattgaaaaactacatagggtgaattttgctctcgtggcattaaagagagaggctgacattatagattatgatatatttattatttttcttagtagatttcttgaccagcctttagatatgcttgctctgtcatggcataaagccttaaaccctaaagccctttacatttgtacagtaccaacaattgtacccaatgttaaatgaatgcggattaatttgtgatatgagaccatcaaaataaaatacttataagatagtagatatatagaaccgtaacaaaaagatgagaagaaaaagacaaattgaatagaaactggaccaaaagataaaagagtatatgaagaagcaagccaccaagaagtgtaaccatcgttgcttcaactgtaaaccgcacattaaatgtgtgtgagagaaagagagatagactccagctgtgagagctacgtccattgcatcaattgggttatatgtcgttaacaattttttaaaaatacataaataaatcaataaaatatttagaaaaaatcaatattataatgatattttgaagaagttaggtccataatggaaatatagagacttagtgtctatttatcaagaaatagtgtctatttatcaagaaataatgtctatttggtccacaattatcatattttttgtggccactcaaactacgaaaataatgaatattgttaatttttgtcttatttaagtctataactaacttactaattcggttgaaattgctaatatgcattttccttggtccactattacagtgctactgctgtcttattcttgaacacaaaataaaaaagatttcaaacacaaaatatgcatttttttgttccaccattacaaacctttatttggagaagtatacagttggatattaaatattttaattaaaaaattgaaaatattgaagttctttttctccagtattttggctggagcaaaactaaataaattccaaattaaaagctcgaacggaaaacatttactatgcaccaaaataaatgttgatatgaaatttgcatcagcatatacagtatgtatgtagtacaattgaacagagtcaaaattaattgtcactgaaacagtcagattttatttctgttaaaaaatattttcagacaaaaaatgattttttaacgtttttttatataattttattaaacctcaaaacattcctcagcagattgttttataatgttattattattttttcttaaataattttatttgaatttcgttatagagagataaataaaagatttttggggtctagttggctctcatagtttgaatgcttatataaggaaacagagctcgaggctctcaataatgccacataaaacacaacaccaaagcctttataactctttctggggtttttaattctctcaacgaacaaaaaaaaaaactcaactaatattctccatcctctttcttcagatttaagagaaaccttatcgttatattctctcttctcttttctttttgactcccacaagaagaaagcaaatttctttttctcaggattgcttgaaaactgtagaaatctttaaggtttttttacaccaataagagtcagagagagagagagagagagaaagagagatctattcataaaaaagacaggtaatctcaactccgaggagataactgatataacaatttgagagaataagaagaagaagaagaagaagaccaagctaaaga

SEQ ID NO: 23 - DNA, 2620 bp, Arabidopsis thaliana
attttaagaaattaaatctttttttttggtatctgtgtgttactttttataaatgtattttgaaaagtattatttcaatttatagataaatataattatgactctcaagtggatttttttttcacggtcaattggagtttggctgtgaatcttgtgaataatatcaactaattaagagtcggccgatactccgtatctttgatcactttcacccatatcttgaaatttaccaaatgttttctttcattggggtttctataccttttttttttggttctttctgtaatttgggttttaaagaaaaaacctataattacaaaaaaggttaaaagttaaaactaagcacgttcaaatatgttctttcgagatcccaccttcctgtctatcttataagaagtcgaacacgtgtgctcgttgtgtgaattagagtggttatttcaacatatataattaaactatgtatgtatcataaatacactgaatatgttggagttgggtcttgtggtaggctaacttgttcgcttcactttggtttagtttagccttgtaatcggtggtttcatatactgaaatttttaattttctaatataatccagatgacaaaaaaaaatcataaatacactgcaatggccatttttaaaaaaactttaaacgaaatatatatacatcaccaagtatcaagtaagtaatttggttgttttgatttttcaaaaaaacatttaggtgattcttttaacaaccaatcatatatgtagcaaagattaattatgtcaatcttttaacgtcacttatatagtttagctgtagtattattgtaagccaattgtacggacttcgtaaccgtttcgacaaagatacaaactaatcaatgtttaagatggcataatattccgacttcccctgccactcggtagtactgctgcgccatcctacaagaagcactcgtaaatgagtggttagacggccaaaaattagcaggattcaatccttgattaagagatggttcagataagccctctaggcctctactcgtcacaattcatatattaattgatcacactgcatgaaatgataagatcaagtcaattacctcaaaattaattgaaagataaaatgataaagcaacaagtaatgatcatatatggatgtaacaaccttcttcatccatacgaatatgataattcttttgtcgatcatttgccacatctatttaactaagtattttgtacattaagatcattttgcgagtattcccgcgttcccaacaaaaacgaattgaaaaactacatagggtgaattttgctctcgtggcattaaagagagaggctgacattatagattatgatatatttattatttttcttagtagatttcttgaccagcctttagatatgcttgctctgtcatggcataaagccttaaaccctaaagccctttacatttgtacagtaccaacaattgtacccaatgttaaatgaatgcggattaatttgtgatatgagaccatcaaaataaaatacttataagatagtagatatatagaaccgtaacaaaaagatgagaagaaaaagacaaattgaatagaaactggaccaaaagataaaagagtatatgaagaagcaagccaccaagaagtgtaaccatcgttgcttcaactgtaaaccgcacattaaatgtgtgtgagagaaagagagatagactccagctgtgagagctacgtccattgcatcaattgggttatatgtcgttaacaattttttaaaaatacataaataaatcaataaaatatttagaaaaaatcaatattataatgatattttgaagaagttaggtccataatggaaatatagagacttagtgtctatttatcaagaaatagtgtctatttatcaagaaataatgtctatttggtccacaattatcatattttttgtggccactcaaactacgaaaataatgaatattgttaatttttgtcttatttaagtctataactaacttactaattcggttgaaattgctaatatgcattttccttggtccactattacagtgctactgctgtcttattcttgaacacaaaataaaaaagatttcaaacacaaaatatgcatttttttgttccaccattacaaacctttatttggagaagtatacagttggatattaaatattttaattaaaaaattgaaaatattgaagttctttttctccagtattttggctggagcaaaactaaataaattccaaattaaaagctcgaacggaaaacatttactatgcaccaaaataaatgttgatatgaaatttgcatcagcatatacagtatgtatgtagtacaattgaacagagtcaaaattaattgtcactgaaacagtcagattttatttctgttaaaaaatattttcagacaaaaaatgattttttaacgtttttttatataattttattaaacctcaaaacattcctcagcagattgttttataatgttattattattttttcttaaataattttatttgaatttcgttatagagagataaataaaagatttttggggtctagttggctctcatagtttgaatgcttatataaggaaacagagctcgaggctctcaa

SEQ ID NO: 24 - DNA, 2792 bp, Glycine max
ttaaaaaaaatctcaaaagaataaattttcgactaccagtaattggattttaaataggaagagattaaaaaaccacctcttaatcttatattccatcttccattccataagattgtgggtgtcattaaaacttattatcaatacaaaatgaaaaataaagagtcacggtttgttgaggagaagaatgcacttagttccaaatcccaatacatgtattaagtagtttcgttaacttttttttattaaattttaattatgttcaattaattatcaatttctataattaatttattattttaccccgaatttgagggggaaaaagttaaacttataagatactttccatgttttttaaaaattgcattcaatatttttcttttttttttcaccctaaaaaaatattttaattagttaactcacattacactcagatccccttaacagaaggtccatgttgatcacattatttttaataaaaaattatgtctaaaataccctcaaataaattacacttgcacttccatgtgtttttttaaaattacatctaatattcctccttttttgtacactataaaaaatctcttaattatttagctcccattacattcactaagacttcttccctctcctaaacacagtttaataatttaatagaaagtagacacaatttgatcatatgacttttaatgaaaatttatatctaaaatattcttatcttcttcctcttaacttcataaaaaacataacattattttgaacctgaaaatattttaatacttttttttctctaattgaacctgaactcaccttgttggtacgtatgtgttaatatctttccttttttttttttacttcaattttttttgtgtgttgagttgtttggttgcaacatttttgttggacatgttcccaacaatgccaattgattgaatatgatcatttgcttcaaattttaatgttttgttcatgcatttgtgttttaactcctttctttgaaatatttatttttgatgactagttgcttgatataatgtctcaatcaagagtttatatcttcttcgagtaatagcaacaacgaagtaaaaataaaatattaaaggaaaattgttattgtcttaagaaaaattcattaacagagtcaattgttaatttgttattgagtatttaacaaagatgttaggacaatttcatctgctcatatattccaattgatgttaattaacgacgttaacggaaagagataaaaataatgtaaaaaaaggaaggtatatcagatgcaatttgagaaaaacacaagaaatacgattataacaaaaatgttaaaacaattttatctgttcacatatttcaattaacgtaacaacgttaataaaaaagggataaaagtaatataaaaaagagaagtatcaagtgtaatttgaaaaataaaaaaacacaagaaatacgagtagtgtaattttttttagattaaattaaataataaagtctttgttaaattaaacataaggttactttataatgctctcataatgaaaaccggatttagaggtaactccaaacctaccttatctaacagctgagaggtactgtttcacctgccaaccatataaggcatttactactactctccagatctcttactgctggattacaacacgctacagcaacacgacgcgcggggtgtgtgttttcgtttacgtagattttaattttttaaggctctaattataattaattacagcgtaattaatatggagtactataaagtataataattataataagccatgtatataaaaaggagaagtgtatctgttaatgtgtactaatatcttacacaaaagtatctgataggagtgctcgtgaaatgaaataaaatgatgttattaccagaataacaaatatagaatttagctaacatatatagttaggttaaaatgtttttatataaatatttaatagaaaattacattctccttacattatagttagcattaacgattaagatgatataataaaatgatcaaatcttattaaatatctgtctaaaaataacttaaactaatataatcggtatataaacttaactcttaaatacaacagtgattaaaataaaatcaactttatcaattattatatttaaaaaattaaatagaaataattttatgaaaaaaattactataaaatgcattgataatattgaatactaataatttttaatagtttgtttttagaccaccaaaccagaatcaatcaagggagggttatttcagcttaactaagtttttatatattattttatttatttcataagattaaaatctcaagtgagatacatgaatcaaatagtagtacttttttttagaatatattaattgataatttaatgtcccagttagcagaagacaggtgggagactatcttactttgtaggccacaaggatcaatgcatgatccgcagcgcttataaatacgtgatgggacgaaagaatatatttttaagttgtggctcaaaagcaattactactaagaaaggataaaggaaggaaggaacacttttctgatattctttttggtattgggttgctgacctttgctagtgttatagattttttgggttctcttgtgttttaataaatacaggaaaaaaaaagtatataggtgcctagaagaaaagacaatatagggtgtggagcaattacgtttgatcacaagggaaaaggtgcaacggtttgcaagatagcatagaagattttgaagaatcttaattgcaacatagtagtgcagttgca

SEQ ID NO: 25 - DNA, 2500 bp, Glycine max
ttaaaaaaaatctcaaaagaataaattttcgactaccagtaattggattttaaataggaagagattaaaaaaccacctcttaatcttatattccatcttccattccataagattgtgggtgtcattaaaacttattatcaatacaaaatgaaaaataaagagtcacggtttgttgaggagaagaatgcacttagttccaaatcccaatacatgtattaagtagtttcgttaacttttttttattaaattttaattatgttcaattaattatcaatttctataattaatttattattttaccccgaatttgagggggaaaaagttaaacttataagatactttccatgttttttaaaaattgcattcaatatttttcttttttttttcaccctaaaaaaatattttaattagttaactcacattacactcagatccccttaacagaaggtccatgttgatcacattatttttaataaaaaattatgtctaaaataccctcaaataaattacacttgcacttccatgtgtttttttaaaattacatctaatattcctccttttttgtacactataaaaaatctcttaattatttagctcccattacattcactaagacttcttccctctcctaaacacagtttaataatttaatagaaagtagacacaatttgatcatatgacttttaatgaaaatttatatctaaaatattcttatcttcttcctcttaacttcataaaaaacataacattattttgaacctgaaaatattttaatacttttttttctctaattgaacctgaactcaccttgttggtacgtatgtgttaatatctttccttttttttttttacttcaattttttttgtgtgttgagttgtttggttgcaacatttttgttggacatgttcccaacaatgccaattgattgaatatgatcatttgcttcaaattttaatgttttgttcatgcatttgtgttttaactcctttctttgaaatatttatttttgatgactagttgcttgatataatgtctcaatcaagagtttatatcttcttcgagtaatagcaacaacgaagtaaaaataaaatattaaaggaaaattgttattgtcttaagaaaaattcattaacagagtcaattgttaatttgttattgagtatttaacaaagatgttaggacaatttcatctgctcatatattccaattgatgttaattaacgacgttaacggaaagagataaaaataatgtaaaaaaaggaaggtatatcagatgcaatttgagaaaaacacaagaaatacgattataacaaaaatgttaaaacaattttatctgttcacatatttcaattaacgtaacaacgttaataaaaaagggataaaagtaatataaaaaagagaagtatcaagtgtaatttgaaaaataaaaaaacacaagaaatacgagtagtgtaattttttttagattaaattaaataataaagtctttgttaaattaaacataaggttactttataatgctctcataatgaaaaccggatttagaggtaactccaaacctaccttatctaacagctgagaggtactgtttcacctgccaaccatataaggcatttactactactctccagatctcttactgctggattacaacacgctacagcaacacgacgcgcggggtgtgtgttttcgtttacgtagattttaattttttaaggctctaattataattaattacagcgtaattaatatggagtactataaagtataataattataataagccatgtatataaaaaggagaagtgtatctgttaatgtgtactaatatcttacacaaaagtatctgataggagtgctcgtgaaatgaaataaaatgatgttattaccagaataacaaatatagaatttagctaacatatatagttaggttaaaatgtttttatataaatatttaatagaaaattacattctccttacattatagttagcattaacgattaagatgatataataaaatgatcaaatcttattaaatatctgtctaaaaataacttaaactaatataatcggtatataaacttaactcttaaatacaacagtgattaaaataaaatcaactttatcaattattatatttaaaaaattaaatagaaataattttatgaaaaaaattactataaaatgcattgataatattgaatactaataatttttaatagtttgtttttagaccaccaaaccagaatcaatcaagggagggttatttcagcttaactaagtttttatatattattttatttatttcataagattaaaatctcaagtgagatacatgaatcaaatagtagtacttttttttagaatatattaattgataatttaatgtcccagttagcagaagacaggtgggagactatcttactttgtaggccacaaggatcaatgcatgatccgcagcgcttataaatacgtgatgggacgaaagaatatattttt

SEQ ID NO: 26 - DNA, 2691 bp, Oryza sativa
tgccggttcggcggaagaaacaccgaccaaattttattaagattgaaagaagttacatgcatccgacattagaccgtcgagttaaggcgagaagacctaagaagcaaaacaaaagaaaaactgagagaagaatgtaaagggcaagtgcacttagggctactcctcactaaaccttcttttgtggattgatgcatcaaaaaactatatgtactaggttacatcgtgttttttttttcgttttcgtctcattctctgcttcggcctgccgtctgcttataccgttaattcgatgatgactccagacttcattcatgaatatatttctactatagatatacaaccctcgctcctctatgtttatcttcatcttcatcttcaggagattcaaacaccacctcttaaagatgaagatgaagatgaagataaaaattaagtgtttcacgtaaaacgatgtattaataacatgtgattaatagagttttaattgttataaacttgaaaaatgaattagtatgatattttagagcaactttcatatataaagttttcgcacgagacgtaccgtttagcagtttgaaaagcatgtcacgagtatccaaaatttaatcttgtgcttgcagaagaaacgaagagggcctaacccatataacctgcgtcattaatctatagcttagcaaagtttacttttttgcctgcctcctggcacaggaacgccgacgaagaaaaacctacaggctttctcaactatgattccttcctcaacctgtgaactctggcgacaggaggacgacaggggtgtatgtggagcagataatgcacagtaataatccaatccttaggacttacaaactgctggaatgaactgaccaagtacgtttagaacgtaggaattttgacttatacatgcatagtgtgatttgtacgtgaaatacattaattaattttctgaatttgtttccaatttctcgtcgtcaggcaatgccgcaatgccttgtcttaaagattgcaaattgaatgcgccatctccatcgatctctctatctccattgatggctgcccaaaaaataaaaaataaaaagagccgacaatgtttaaggagagaagcatacgcgcacgtttcgtgatgaaacatacatgcaagactaatttcgaattatatatcacatattcgctctctgaatgagcgtatcgggtatttggaatttcgtttgatatgtaaaagttgaattttaggttacttttttgtggaataatatatcataaattaatattttttataactatttatgtgacatgtaaatgacgagctgatatcagtttaggataatttcctcgctaggtgattgaacgaaccctgcacgcggcagacgtcgtggctactactatctagctagctagcgttggttacgcgtggctactatccagccagaattggttacgccgtcgcccatcgatccgccacaccacgccaaacgcgaacttaattgctactatccgatagtatgtacgcgtactacacaaaagtggggaaaagaaggttgtcctgactccatgagaagacgatccaaaacacggggccggacaaccaaacaagctagctagcggccggcggcgagccaccgtcgtcgttgctgaagacgtcgactaatttggcctcccggccggcgccatcgatcatctcaaaattaatactccctctgtataagggattttgagtttttgtttgcactgtttgatcactcgttttattaaaaaaatttgtgacaatataaaaaacgagaagttgtgcttaaaatacttcggataataaagtaagtaaaaaataaataataattctaaaaaaaatttaataaaataagtgtgcaaacaatacaagcaaaaactcaaaatcacttataatcatgggacggagggagtatatagtatccaaaaatcatctcaaaattaaaaccgaatcgaaactcgccgggccgcggcccgcccggccgtcctggcccaattaattccggcgaccgctgcatgcaacgctccgtacgtgatcgcccagcggctcgcgcgcgcaccacgcgtccacgcgtctctctcctttatacatggacaatggattaatttacttgtagaaaaaaaaacacgaggctagcttagcttgtgcccggcccagccgcgtgcgtgatttccccaagttcacaacctgtacgtgtgtgtggtacgtagcggtcgcaatcccgtttcaaatctcgatcgtgtgtggtgccattaactccgtctggttggggaagccggtggcggatagcccgactgacaggtgctgtggcctggcggccggccggccaatcgatggatggacggatggatcccatcgatgatccttcgttgattcgcgtcaacctctcgctgcccgaatcggactctcaccttccccgccctccaccgctgtgaccgcgcgctgtctgtcccttggctaataccagtcgcagtgcaactgtgcaagtgtttcacgtatataaaagcatcccgagacgcagcgcgcatgaccagccgcgttgggtgcaaaaccacaaccgccaacatcttctaactcccctcacggctctccctctccccgcacgcacaacaccggtgaacccctacgtactactgagctgagctgagaggacgaagaagaagatcaagctcgaggggcttgcgatc

SEQ ID NO: 27 - DNA, 2500 bp, Oryza sativa
tgccggttcggcggaagaaacaccgaccaaattttattaagattgaaagaagttacatgcatccgacattagaccgtcgagttaaggcgagaagacctaagaagcaaaacaaaagaaaaactgagagaagaatgtaaagggcaagtgcacttagggctactcctcactaaaccttcttttgtggattgatgcatcaaaaaactatatgtactaggttacatcgtgttttttttttcgttttcgtctcattctctgcttcggcctgccgtctgcttataccgttaattcgatgatgactccagacttcattcatgaatatatttctactatagatatacaaccctcgctcctctatgtttatcttcatcttcatcttcaggagattcaaacaccacctcttaaagatgaagatgaagatgaagataaaaattaagtgtttcacgtaaaacgatgtattaataacatgtgattaatagagttttaattgttataaacttgaaaaatgaattagtatgatattttagagcaactttcatatataaagttttcgcacgagacgtaccgtttagcagtttgaaaagcatgtcacgagtatccaaaatttaatcttgtgcttgcagaagaaacgaagagggcctaacccatataacctgcgtcattaatctatagcttagcaaagtttacttttttgcctgcctcctggcacaggaacgccgacgaagaaaaacctacaggctttctcaactatgattccttcctcaacctgtgaactctggcgacaggaggacgacaggggtgtatgtggagcagataatgcacagtaataatccaatccttaggacttacaaactgctggaatgaactgaccaagtacgtttagaacgtaggaattttgacttatacatgcatagtgtgatttgtacgtgaaatacattaattaattttctgaatttgtttccaatttctcgtcgtcaggcaatgccgcaatgccttgtcttaaagattgcaaattgaatgcgccatctccatcgatctctctatctccattgatggctgcccaaaaaataaaaaataaaaagagccgacaatgtttaaggagagaagcatacgcgcacgtttcgtgatgaaacatacatgcaagactaatttcgaattatatatcacatattcgctctctgaatgagcgtatcgggtatttggaatttcgtttgatatgtaaaagttgaattttaggttacttttttgtggaataatatatcataaattaatattttttataactatttatgtgacatgtaaatgacgagctgatatcagtttaggataatttcctcgctaggtgattgaacgaaccctgcacgcggcagacgtcgtggctactactatctagctagctagcgttggttacgcgtggctactatccagccagaattggttacgccgtcgcccatcgatccgccacaccacgccaaacgcgaacttaattgctactatccgatagtatgtacgcgtactacacaaaagtggggaaaagaaggttgtcctgactccatgagaagacgatccaaaacacggggccggacaaccaaacaagctagctagcggccggcggcgagccaccgtcgtcgttgctgaagacgtcgactaatttggcctcccggccggcgccatcgatcatctcaaaattaatactccctctgtataagggattttgagtttttgtttgcactgtttgatcactcgttttattaaaaaaatttgtgacaatataaaaaacgagaagttgtgcttaaaatacttcggataataaagtaagtaaaaaataaataataattctaaaaaaaatttaataaaataagtgtgcaaacaatacaagcaaaaactcaaaatcacttataatcatgggacggagggagtatatagtatccaaaaatcatctcaaaattaaaaccgaatcgaaactcgccgggccgcggcccgcccggccgtcctggcccaattaattccggcgaccgctgcatgcaacgctccgtacgtgatcgcccagcggctcgcgcgcgcaccacgcgtccacgcgtctctctcctttatacatggacaatggattaatttacttgtagaaaaaaaaacacgaggctagcttagcttgtgcccggcccagccgcgtgcgtgatttccccaagttcacaacctgtacgtgtgtgtggtacgtagcggtcgcaatcccgtttcaaatctcgatcgtgtgtggtgccattaactccgtctggttggggaagccggtggcggatagcccgactgacaggtgctgtggcctggcggccggccggccaatcgatggatggacggatggatcccatcgatgatccttcgttgattcgcgtcaacctctcgctgcccgaatcggactctcaccttccccgccctccaccgctgtgaccgcgcgctgtctgtcccttggctaataccagtcgcagtgcaactgtgcaagtgtttcacg

SEQ ID NO: 28 - DNA, 2946 bp, Populus trichocarpa
tactgtgaaaaaataacttgtccagtttttatttcatctgcatttttcaataccaacaaaatcatcgtgaaaatatttgatctaaaaaatcattttttaccatctatttcctattagaaattccaacaccatttatttttatgatagaaaattttatttatttatttgataaaaaataatgaaagaaaatgacgaggaacttaataaaaaaatataataaaacaagaaaaaggataagatttttttaaaagaatgacaactaagattggataaaaaaataaaataaaatactgagggacaaaattgaaagaaaaaacaaattaagaaaaggataaaaaagagcaattccaaaaataaggactaaatctggaaaaaaagaaatgaaataaaatatcgagggacaaaattgaaagaaaaacaaaccaagaaaattataaaaaaaaacaacaatcaagagaatgagtaccatgtttgatataataacaaaacaaaatcaatgaaaatggatgaaaatgaagaaaaaatccaaaacaaagaaagagcaattaaaagaaagaggatcataattgaatttttttcaccattattttttttatcaaaataatataaattttactttttagttgaataaaaaatcaagttattagttaggggaaaatcatgttaacacccattgatttttatttttgccattatttttttttatcaaaataatgtcattttacttcctgcaaaataaaaaactcgattgaccctggtaaccctgatcactcgacccaacccatgactcgggagatgatgggggtcgactcctaagccgggttttaaaagcatgataaaaaaataagcactaaatatgaaatgaaaatccaataaaattaaacaatgactgatgaaattgcgaaaaaaaattaatcaataagagaactaaaaataacaggaattacaatcataagaataatgaacgaattcaacaaaaaaaagaattaaaatcaaatgataatggattaaattgaaaaataaattccaattagaaaaaaaaagattaaaagcaaaataaataggaataaaaaaatgaggatcaaatttgacaaaaaacataaaaaaatcaaatgttaagggatgaaattaaaaaataaataaatcagattcgatacaattagaaaattgagaaccattttgcaactttacaaggttaacacatcttttgatatagaggagagagaaaagaggggtggagaaaattttttgcttgaactccgctgcgccacgaatgatgacatgtgttggcccaccgtgtggagggcgacatgacacttcggatgccgttgttaaagaccactaacaaccactgggaggagcctcacgcgccactcaaaaggcgcgagcgccttccacttgctggcgagtgctctgcgcgccccaactacttttttttttgaattacagaaagatcataacattcatgaccccacatgataatttaaaaaaaatctaaaaacaccccttgaccttaaacaagaaaaagttaattccaagggttattacagagagcaaaacactcctaatcccatgtgataattgcaaaaataaacctaggtttgagaaaccaaagataccctttacccttagaaaatatttttgaccccaagagctatttggtaattagactatgaaaaaatatgaaaattaagaaatgaccattgaacataaaacctttttttttccttctaaaatcatgggcgtaattatactaagcaacaaaatgtaaaaatactattccactcttatatgtattttatattttgatatctttgaaggacaaattaatcgttttattatgaattgcactgtggacaatccacaataaaatactgataccttttagttatatgttaaacattgaagaaatgttttttcatatttttcacgatttttttatttttatatcttttagttttccaaatttaatagtaaaaattaaattgggtaaaattattagtctaaatatgatgtaaacataaacattaaaatgataaaatatttaaagagatatttatataaaaaaattaatttattgccatccctatcttttatcttctttaaccttccttgctagaaagaataaaaaaaaatagttaaaaaatattcttaaaatcaagacaaaaattaattattatttccatctccaccataaaatatatttcttattggtttatttgatattataatagcggttgtttttttataaatatattaattattttttaaaatttatttttaacattaacacatcaaaataattttaaaaaattaaaaaattaattttaaataaaaaaaccctataatagaacgtaaaaaaaacaaacacgtattttgaattaattaccaatttggcacaaaccgtgagctgaattcttcaactgcccaaccaaagagtcattaatttctaggagcatgaggccaccactccagctgtgtgccaaatgacaagggaggagaggaaatgagacaaaaacatggaagtgtgagctgctaaataaagattgattaagaacttcaactgtatttttggtccttccttcaagctatatatatgtgggtgcctccataaagatatcgcagttacgagtaatagatatacagtgttagtcgagtctttaaaggaaaaaatcaaagagagagagactgaacttgatactctcttcctttcatctctctctccccctcttaccctctaagggttgctccatctggagcttgcgttcatgttttttcgcttcatttgtggtgtagctaaccactttgagccataaccagggaactatctttttacccaacaagataaagctgcttacaggagcaaaattgagacatatactccagtaaaaactcaagaaaaaattgaagaaaaccgttgaagatcaggtgctttactgcaaaaaa

SEQ ID NO: 29 - DNA, 2500 bp, Populus trichocarpa
tactgtgaaaaaataacttgtccagtttttatttcatctgcatttttcaataccaacaaaatcatcgtgaaaatatttgatctaaaaaatcattttttaccatctatttcctattagaaattccaacaccatttatttttatgatagaaaattttatttatttatttgataaaaaataatgaaagaaaatgacgaggaacttaataaaaaaatataataaaacaagaaaaaggataagatttttttaaaagaatgacaactaagattggataaaaaaataaaataaaatactgagggacaaaattgaaagaaaaaacaaattaagaaaaggataaaaaagagcaattccaaaaataaggactaaatctggaaaaaaagaaatgaaataaaatatcgagggacaaaattgaaagaaaaacaaaccaagaaaattataaaaaaaaacaacaatcaagagaatgagtaccatgtttgatataataacaaaacaaaatcaatgaaaatggatgaaaatgaagaaaaaatccaaaacaaagaaagagcaattaaaagaaagaggatcataattgaatttttttcaccattattttttttatcaaaataatataaattttactttttagttgaataaaaaatcaagttattagttaggggaaaatcatgttaacacccattgatttttatttttgccattatttttttttatcaaaataatgtcattttacttcctgcaaaataaaaaactcgattgaccctggtaaccctgatcactcgacccaacccatgactcgggagatgatgggggtcgactcctaagccgggttttaaaagcatgataaaaaaataagcactaaatatgaaatgaaaatccaataaaattaaacaatgactgatgaaattgcgaaaaaaaattaatcaataagagaactaaaaataacaggaattacaatcataagaataatgaacgaattcaacaaaaaaaagaattaaaatcaaatgataatggattaaattgaaaaataaattccaattagaaaaaaaaagattaaaagcaaaataaataggaataaaaaaatgaggatcaaatttgacaaaaaacataaaaaaatcaaatgttaagggatgaaattaaaaaataaataaatcagattcgatacaattagaaaattgagaaccattttgcaactttacaaggttaacacatcttttgatatagaggagagagaaaagaggggtggagaaaattttttgcttgaactccgctgcgccacgaatgatgacatgtgttggcccaccgtgtggagggcgacatgacacttcggatgccgttgttaaagaccactaacaaccactgggaggagcctcacgcgccactcaaaaggcgcgagcgccttccacttgctggcgagtgctctgcgcgccccaactacttttttttttgaattacagaaagatcataacattcatgaccccacatgataatttaaaaaaaatctaaaaacaccccttgaccttaaacaagaaaaagttaattccaagggttattacagagagcaaaacactcctaatcccatgtgataattgcaaaaataaacctaggtttgagaaaccaaagataccctttacccttagaaaatatttttgaccccaagagctatttggtaattagactatgaaaaaatatgaaaattaagaaatgaccattgaacataaaacctttttttttccttctaaaatcatgggcgtaattatactaagcaacaaaatgtaaaaatactattccactcttatatgtattttatattttgatatctttgaaggacaaattaatcgttttattatgaattgcactgtggacaatccacaataaaatactgataccttttagttatatgttaaacattgaagaaatgttttttcatatttttcacgatttttttatttttatatcttttagttttccaaatttaatagtaaaaattaaattgggtaaaattattagtctaaatatgatgtaaacataaacattaaaatgataaaatatttaaagagatatttatataaaaaaattaatttattgccatccctatcttttatcttctttaaccttccttgctagaaagaataaaaaaaaatagttaaaaaatattcttaaaatcaagacaaaaattaattattatttccatctccaccataaaatatatttcttattggtttatttgatattataatagcggttgtttttttataaatatattaattattttttaaaatttatttttaacattaacacatcaaaataattttaaaaaattaaaaaattaattttaaataaaaaaaccctataatagaacgtaaaaaaaacaaacacgtattttgaattaattaccaatttggcacaaaccgtgagctgaattcttcaactgcccaaccaaagagtcattaatttctaggagcatgaggccaccactccagctgtgtgccaaatgacaagggagga

SEQ ID NO: 30 - DNA, 2817 bp, Vitus vinifera
tatattatgtaagtttgaaaaaaaggataatatttgataaggtatttaaaaattatttacttcaaaaatgcattcaacaataataatttttaaccatttatctttcatgttcaatttattggagaaaaattattggtaaatcattcaacttggtcccattaataaataggtactaataaataggtgagagaatggtgaaaaaaccaaagagagaataagaaaggtagagtgaccagagttttttcatttaatagtcagaggtattttaggaattttttgaagacaatatctttcatttcaatttctactctttcattgggttttaagtttaattataaattatatgaggaccttatctcaattattcaacccaactgggatagaaacagaattctccctatttagattagggaaaattgatttaaggttttttttttttaaatagagttaacaataaaatacaaactaacaaactttcaagagaaagaaaaaaaaaacacttataatattacaaaaaaaaaaaaaaaaaaacacatcctaatcacatagcaaaactcaatattttttctctctcttcttttgtcctattaacaaccaaacatgattcaattaattgaattaaactattaaactaataaaaagagccgatccaacttggttgttagttgttccgtattgcatttgcttttacggatgaggaaattgaattaaaattgtaattagcataacagacgaagaactgaatatagtcagggagtagaggaaaagtttagattatatttatgacattaaaaatcaacctaatccaacttggttgttagttgttccgtactgcagttgatttttatgcataagaaatattggacggtccaatataatataatattagttgatatatagctttcagttaggttggaaggtggacaattgcaagtgccaagtcaaggttagtggcaagggcggctccatcattcacaatttgcctgccattacctcccttttgcttggagttttcccatcaagcaatacatttattgttgtttatagtgttaaagggattatgcaaatatcatttcatataagctgaaggaaatttcatgaaaaaaaaaatagcatttattatttatactatgaaggcaaccatagaaattaatatcatttcataaagttaaacaaatttaaggcaaaaaggaatttgttgcctatcacattaaagaaaatgatagaattaagggaagaaaatttagtctatgtttagtttttgaaaaatttgaaaaaaaaatggaaagaaagaaaataaaaataaaaaataaattatttttatatgttttcttaaatttcataaacttatttttcttcattgtattaagattaaataattttaaaatatataaatttttaattaattttaattatattttattttcttttatatttttcatgatgaaatcaaacatgaaaaaataattttttttaatatttttttttctttccttattatttttcaagaaccttaaaaatgtaaaagttttaagttttaagttgatttctttttcttttttttagtcttttttatttttaggaaatataaataattttaaaaatctgtaaggatttttttttcatttgataatataatcatatttttataaataatgaacatatactttgagactttgaattaatgtaaatttaaataattatcctcctaaataatatttataaaaattgaatgtagttctcaagaaaagaaagaattaaaataaattgttcaatttttactttttttatttacttaaaatccaactattttccaaaattttgagggagtgagtacatagaatgattcatttttcttctactcataattcattttggagattcaaatgaatgaaaattagatagtatagtctattttcaaattcacaagttgaagaaaaaaaagtgatgatgagtagaaagatgtatcgtcaagttcatcatttaataggcacaccgccacaaatcctcattcatcttgaagaatgaacttagagatgagattttggaagtgtacagtgtgatacgtatgagtggtgtgtattggtacattaagatggataaagatggaaataaaatggagagaaagaaagagagagaggaggaaaaatagaacatgctgctgaatagtatagggtaaccggccccatgacttagcaatacgcaattactgaaaagctccaaccctcctcccaaccatgagccattaatgtcttaagagaatcaggccatcactacagctgtgccatcctccctagcaaatgcccctacgcgttctcaatttggaggacactttttggtcaatttcggtgacgttcatactttgcctagagacaaaatattgatcaatattacaagctaaccgatagagactgattaagagctttaactgtatttggatgcccacttagtttttggagctataagtaggtgcattggagttgggaaaaataaaggccagagtttgggagacttgcaaccaagtttcacaaatacaggggcttaatcaagttgtttcattatccaattattttattataaggcaattccaacctcttaacctctcgatctctttccttctttctgctgcttctatctgggaattgtttccttccctttcctctctttctttttcttgtatttggcttcttctactattttgggctacaatatctcggatctttctgttcccgaactgaaacttttcctcatcaaaagcctgtacagatagagaagagtttgcacatatattaagaaaggaataattttgtcggaaaa

SEQ ID NO: 31 - DNA, 2500 bp, Vitus vinifera
tatattatgtaagtttgaaaaaaaggataatatttgataaggtatttaaaaattatttacttcaaaaatgcattcaacaataataatttttaaccatttatctttcatgttcaatttattggagaaaaattattggtaaatcattcaacttggtcccattaataaataggtactaataaataggtgagagaatggtgaaaaaaccaaagagagaataagaaaggtagagtgaccagagttttttcatttaatagtcagaggtattttaggaattttttgaagacaatatctttcatttcaatttctactctttcattgggttttaagtttaattataaattatatgaggaccttatctcaattattcaacccaactgggatagaaacagaattctccctatttagattagggaaaattgatttaaggttttttttttttaaatagagttaacaataaaatacaaactaacaaactttcaagagaaagaaaaaaaaaacacttataatattacaaaaaaaaaaaaaaaaaaacacatcctaatcacatagcaaaactcaatattttttctctctcttcttttgtcctattaacaaccaaacatgattcaattaattgaattaaactattaaactaataaaaagagccgatccaacttggttgttagttgttccgtattgcatttgcttttacggatgaggaaattgaattaaaattgtaattagcataacagacgaagaactgaatatagtcagggagtagaggaaaagtttagattatatttatgacattaaaaatcaacctaatccaacttggttgttagttgttccgtactgcagttgatttttatgcataagaaatattggacggtccaatataatataatattagttgatatatagctttcagttaggttggaaggtggacaattgcaagtgccaagtcaaggttagtggcaagggcggctccatcattcacaatttgcctgccattacctcccttttgcttggagttttcccatcaagcaatacatttattgttgtttatagtgttaaagggattatgcaaatatcatttcatataagctgaaggaaatttcatgaaaaaaaaaatagcatttattatttatactatgaaggcaaccatagaaattaatatcatttcataaagttaaacaaatttaaggcaaaaaggaatttgttgcctatcacattaaagaaaatgatagaattaagggaagaaaatttagtctatgtttagtttttgaaaaatttgaaaaaaaaatggaaagaaagaaaataaaaataaaaaataaattatttttatatgttttcttaaatttcataaacttatttttcttcattgtattaagattaaataattttaaaatatataaatttttaattaattttaattatattttattttcttttatatttttcatgatgaaatcaaacatgaaaaaataattttttttaatatttttttttctttccttattatttttcaagaaccttaaaaatgtaaaagttttaagttttaagttgatttctttttcttttttttagtcttttttatttttaggaaatataaataattttaaaaatctgtaaggatttttttttcatttgataatataatcatatttttataaataatgaacatatactttgagactttgaattaatgtaaatttaaataattatcctcctaaataatatttataaaaattgaatgtagttctcaagaaaagaaagaattaaaataaattgttcaatttttactttttttatttacttaaaatccaactattttccaaaattttgagggagtgagtacatagaatgattcatttttcttctactcataattcattttggagattcaaatgaatgaaaattagatagtatagtctattttcaaattcacaagttgaagaaaaaaaagtgatgatgagtagaaagatgtatcgtcaagttcatcatttaataggcacaccgccacaaatcctcattcatcttgaagaatgaacttagagatgagattttggaagtgtacagtgtgatacgtatgagtggtgtgtattggtacattaagatggataaagatggaaataaaatggagagaaagaaagagagagaggaggaaaaatagaacatgctgctgaatagtatagggtaaccggccccatgacttagcaatacgcaattactgaaaagctccaaccctcctcccaaccatgagccattaatgtcttaagagaatcaggccatcactacagctgtgccatcctccctagcaaatgcccctacgcgttctcaatttggaggacactttttggtcaatttcggtgacgttcatactttgcctagagacaaaatattgatcaatattacaagctaaccgatagagactgattaagagctttaactgtatttggatgcccacttagtttttggagctataagtaggtgcattggagttgggaaaaataaaggccag

SEQ ID NO: 32 - DNA, 456 bp, Zea mays; identical to SEQ ID NO: 6

SEQ ID NO: 33 - DNA, 2980 bp, Setaria italica
gaacgacggaaactgctagcgtaactatagaattctggaaaggataggcacgtcgtttttcagtccactccgtacagcgacagaaacagacgtctctcaaaaaatcagtacaggtgtaatgacatttacagccacgaaggatcgttttctttgctatacatactcaggtttttctctacttatactaatctttcgctaatttatctctgaccagtaaaaggctgtgtttcctattgtgcgcagaaagatcagaccacacgccaagagccgtgccgaggtatatatggaaacagtacactactatctgcagcagtgcagcatcgatttcttcgccccttctcctgaaaagtcgagatataaaaagatggagaaaacctcggtcaaatttggattagttgcatgcatgcatgcatttcatcgcgaggattacctccgttttaaaatgcttgacatgattttcaaaaccacatttaacaatttgtcttattaaaaatcaatatattatgtaaaaatataaattatatttaaaatatatttaataataaaacaagtcacaattaaataaactatactccttacataggtttataggtttctgaaatctgaacaagacgattatcatgtgcagagtccaaacgtcaacggtgtaaaacaaacacttgaaacccgaagtaaatataccttcatccaacaacattgacaatactactacttcctccgtttcaaattgtaggtcattttagcttttctaatattattatgcatccagacatacactatatctagtgcatagaacaactatacgcctagaaaagtcaaaacgacctataaaggtataaaggagtggtagttgcttatccaagatgattagcgaattgcatcttagaagtggataagatgcttaaatttgcaccgtactttggtacacatggtagctttcctcatgggaattaacttcaaaccgctcttatgacccttcaagtacttgtgtttaagcacacaccttgcattttagatgccataatatacatttttttgtcctttttaaggcattcattttttttagttttgacttgttttgttattgtattactatcacaagccgatgatgcatcatgcatgtaattacctgacctatttcactcaggctatttctagtggagagtttcatctcacagtttccaagaatgacatgtcatcaaaagaggtttgatttctagtggagagtttcacctcacagtttccaagaatgacatgccatcaaaagaggtttgagttgatgaatgaaacaataccccccaatgcagagttttatttcacacccataccatttaattgtgaggcctgtgattggatatgctaagatgaaatgaaactctatagccccaaatgcaagtttcaacaggtttcgtagtcttgaaaacagtgcatacacagtttcatcttgagagcaagtttaataacgcagctagcaagcgggctgcaaggtttctctcagccttttcctagcccactcgtacaatggttaactcttcaccattaatacatgatccacaagtcattctcacaaagtttcttggttcctgtgcccaagtcggctataagcttatagcccgcttctcctctctcacctcttctctctcctccacgtcagcattcagccagcttacagcctcttattatacttgctctgatgaaactcttttcctctctcacttcataattaccttgccatgttatcaatgtgtcatcgtatttaacgtatatgaaatttctatgaaacttgcactggactagcttttttgtttttgcgaaacaccgtcgacatcgagagcagtgcttagttggctgctgttcacacaggtcatcaaagaaatgaagcactgctttaaacatttgctcttatacttggctacaatggaagaggcacctaatttggacgctccatatgctatacgatgaatgtaaaagtagcagtggagaaccgagaacctcttccttctccatcactcaataactacggcggttatctagtcttaaaaatttgtcaacagtgcattattcatgaacaggacgtacgtccactgccaaacaatctcgtagccggaaattaaataaccaagaaaaaaatgaaaaatacaccggcaaattaaattatgtaagcctatctttacatggaaaatgcatgattgggcttgctgccttcgtcaattttctcctttatggctgtacacatatatagcttgaaataaatatgtatgacatgcagatatatgaacgtttattttcacattttccacgaaaaaaagtatataatgacgtccaataaatccaaaatacatgacatatttcgcatatttcgccgtattgtagcacacatattgttgacgaaaataatataaaaatcatgcacccgtctcgctctctctctcctagcaattacgatacgccctctcaataaatgcggattgcaccacctcaacactcgtccgcaataactccttcccctcttcctccacattctcttccacctccgttcccctttcttctcttcctcttcctcctcctcctcccttccccttccatggctgtctagctcctcaggatctctccgtctctccacttcctgctagctacccttctgagcttgcacgcggtaaagaatcatctcgagagctgcaacttgcaggcagacatagagagagatcagagttctatttttgcaaaggcgcacaacatatatagttcttctgctagatctcactgccagtctcacagagcgaaggtttatttgggctagtttgcccctagatctgttgctggctgtgttgttgcttggcaggcaaggtatctctatataggaataggattagcgcctgttctttggctgtagagagagagagttgtcctatgtgtctctgaagaaatggaaacgaatgagacggcaagaaattagggtttgcgaggtggtcagaggaga

SEQ ID NO: 34 - DNA, 2500 bp, Setaria italica
gaacgacggaaactgctagcgtaactatagaattctggaaaggataggcacgtcgtttttcagtccactccgtacagcgacagaaacagacgtctctcaaaaaatcagtacaggtgtaatgacatttacagccacgaaggatcgttttctttgctatacatactcaggtttttctctacttatactaatctttcgctaatttatctctgaccagtaaaaggctgtgtttcctattgtgcgcagaaagatcagaccacacgccaagagccgtgccgaggtatatatggaaacagtacactactatctgcagcagtgcagcatcgatttcttcgccccttctcctgaaaagtcgagatataaaaagatggagaaaacctcggtcaaatttggattagttgcatgcatgcatgcatttcatcgcgaggattacctccgttttaaaatgcttgacatgattttcaaaaccacatttaacaatttgtcttattaaaaatcaatatattatgtaaaaatataaattatatttaaaatatatttaataataaaacaagtcacaattaaataaactatactccttacataggtttataggtttctgaaatctgaacaagacgattatcatgtgcagagtccaaacgtcaacggtgtaaaacaaacacttgaaacccgaagtaaatataccttcatccaacaacattgacaatactactacttcctccgtttcaaattgtaggtcattttagcttttctaatattattatgcatccagacatacactatatctagtgcatagaacaactatacgcctagaaaagtcaaaacgacctataaaggtataaaggagtggtagttgcttatccaagatgattagcgaattgcatcttagaagtggataagatgcttaaatttgcaccgtactttggtacacatggtagctttcctcatgggaattaacttcaaaccgctcttatgacccttcaagtacttgtgtttaagcacacaccttgcattttagatgccataatatacatttttttgtcctttttaaggcattcattttttttagttttgacttgttttgttattgtattactatcacaagccgatgatgcatcatgcatgtaattacctgacctatttcactcaggctatttctagtggagagtttcatctcacagtttccaagaatgacatgtcatcaaaagaggtttgatttctagtggagagtttcacctcacagtttccaagaatgacatgccatcaaaagaggtttgagttgatgaatgaaacaataccccccaatgcagagttttatttcacacccataccatttaattgtgaggcctgtgattggatatgctaagatgaaatgaaactctatagccccaaatgcaagtttcaacaggtttcgtagtcttgaaaacagtgcatacacagtttcatcttgagagcaagtttaataacgcagctagcaagcgggctgcaaggtttctctcagccttttcctagcccactcgtacaatggttaactcttcaccattaatacatgatccacaagtcattctcacaaagtttcttggttcctgtgcccaagtcggctataagcttatagcccgcttctcctctctcacctcttctctctcctccacgtcagcattcagccagcttacagcctcttattatacttgctctgatgaaactcttttcctctctcacttcataattaccttgccatgttatcaatgtgtcatcgtatttaacgtatatgaaatttctatgaaacttgcactggactagcttttttgtttttgcgaaacaccgtcgacatcgagagcagtgcttagttggctgctgttcacacaggtcatcaaagaaatgaagcactgctttaaacatttgctcttatacttggctacaatggaagaggcacctaatttggacgctccatatgctatacgatgaatgtaaaagtagcagtggagaaccgagaacctcttccttctccatcactcaataactacggcggttatctagtcttaaaaatttgtcaacagtgcattattcatgaacaggacgtacgtccactgccaaacaatctcgtagccggaaattaaataaccaagaaaaaaatgaaaaatacaccggcaaattaaattatgtaagcctatctttacatggaaaatgcatgattgggcttgctgccttcgtcaattttctcctttatggctgtacacatatatagcttgaaataaatatgtatgacatgcagatatatgaacgtttattttcacattttccacgaaaaaaagtatataatgacgtccaataaatccaaaatacatgacatatttcgcatatttcgccgtattgtagcacacatattgttgacgaaaataatataaaaatcatgcacccgtctcgctctctctctcctagcaattacgatacgccctctcaataaatgcggattgcaccacctcaacactcgtccgcaataact

SEQ ID NO: 35 - DNA, 3000 bp, Vitus vinifera
tcagactgtcttgagccatcatcatcatagtttaacccatggttgtaaaggatccaatcagagtcacacgctgcacgcgcgcgcacacatttagagggattcctttttgtctagattgtaaaaattataatttttacgaattactatagaattaagacaaaatagtaaaagattcctacctggcactgtaatttttcactttacacgtggtaaattagtctgacatatacagtgcacgctcatttttaacgcatgcatgttagtccaccttcaagcagaggctagatgctatgttcgattcaaaaatcaaaacaaaaaggttgtttcacattatgtccgatttgaaaaaccaagaaagaaaagaaaatcttgtttcatgtagaaggagataaaattttaggcaaagatcaaaatttggtaagaagtaacataattgttggtttgtttatcaaatatggcaagctttacacggtaatatgcaaccaatatatgcataattacatttgtatgtagttaatagcataatagcatgcagctaatgtgtacactcttttgatatgtacatatcacactacaccatggtgcaagaatgttagagcatatatagaaatggggggtttcatgaattacaaatatttggtaagcttgttatctaaaggcaatattaggttgatatttttttcaatttggtgagggaacaaaactgccttattaacaatatccaaatttatgattgagtggaataagaaaaattaagggtgccctgaagacagccattagcccacagattttggtacaataagatacgttatcaagctaagagatttgtgcaagggaggcatgaatatagtaaatgatttattctgcatgcagaccctgctcgtggctcaggcatttaatggaatattgctagggagaaggaggagagatggggctaaaatgcttcatcacagctccacctccacctcctcctcctgataattccctttcttaattccctcacatacccacatgtaataatagatctttgtcacggggattggtgccaaaaacatcatatttggaacattaactattaatccatgttttccatacatgttactcacaaaatcttctgtttatacaataaattattggatgcatgtagcaaaatccttttaaggggtgattcattagggcaaatcgtgctttatggacatggaagttcaactcaattgaggcgtaaacagtgaaaacagtgtcacaaaacaaccatttgtaaaagcttaaaaggtactgtatatgagaagcgattaatgatatacaaacaaggagagaaacaataaaagaagtttgaaaaggagttggagaaaaggtgatgggagaatgagaaaaaaaaaaaaaggaataaaagaaaaagaaagagttgaaaggagtgctgcagttaagatgggtgtaattggcttcaccatacacgctctctcaaagacatctaaacatcaaacgcttatatgcttctgtatttctatatatatttctctctccttagcaattacacctccatccaccataaatgctattgcaccctctcaatacgctctgcaataactcctcgctgccacatcttctccacctgttaccctttcttcttccctttctcaccttctccaaagctctctgcctttcgagtctatctcctctttttcgccgtccctttattctccctctctctctctgcctcttcctctctcagtgttcttctcaaaacctgttactctcatctaaagctgccagaaaaccactctttcagcgcccaaaaagtggttttccggtgacccaatagtctctaaaacagatctgccactttgctcactggacttgaccttcatcttcaaaagggtcgttttgcttttctcccatagcttccgcacctgtaagttattttgaccccataggtcttctccatttttcaccagtctttatttatttttatttttttttgagtggggggtctaaatggggttgcaacaccatcattctcatccttaactgtcttgagacacaagattttttcacctttctttgcatattttattaacttctgagtttttgctctattttccgttatcttttttgcagtagagaaagagcaaaggttgaggttgaggttggacgcaccgagatcttcgtgggcgttatggtttgaaattggtgtttcaaagcccattccatactgtccactctatcttccatttttctccagtaagagctttgtgacctacgaacagaaatacagggtcaagatcttctttcaaagcccaaagccacagttgtagctcctccactgctgcatgtttagggtttgtgggggcagtgacacttcccggccggaataatgcttccggctaatgactggccactgccaattgaaaggaacctaaaggttgctggatttgggttgtcatcaggactaattctaagcgtggtaagccttcgtggcagtccaagttctattgatgtccatttcatggactgtgagtctgtgaagactgttagggttgtctgggtttgggtttttcttttatcattttcttagtcatttcattgtttcctcatctctcttttttctttttctttttctttttctaaatatatatacatattcaagatcaattagattagtagagggtttttgctaggcattaaggtatttcaagaaaaatcattctcgatacaaacgctaaaaagctgttttgcagatgagagagagagtcttctcataaacaggttttcaaaagtgggatagggatccataacctaagaaaattaattcactgcttaatactatgtacagatttccacacatgattaattcttttcttcttaattcaaattcttgagggtttttttttttttttttcattctttacatgggcttcttccttttgaagtggttgactcatttcattctcttggcagattgaagaaccctagctttggaatcataaaggatctgtgaat

SEQ ID NO: 36 - DNA, 3134 bp, Populus trichocarpa
aattaatcttttttttgtttgatttagttcgttaatattaattttttttctatttagttatcacactctcaggatacggatcccaggtttgacgggttaacccagttgattcagaatgtttttctttttaatttggtttgcataatttttgttagagtttttggattcatacatgtgtttggaaaacacccctcaagcctatttttagtggttttattacaaagaaaaatggatgtttggccaaacaaagcctaaaatttttttaaatataaaaaaacatcttttttcttgcatatggctaaaaactcctaaagttatttaagcatttcttttataaaaaaaatttaaaatacttttatatgttttttctaaaaaaaacatattgcataaattttacaataagtttgtaaaatttctaaggattttggcctacatttcagaaatacaaaaaaaaattattttgtttcttttaatatgtgagattatgaacttatatgtaagacttattcctgctattaaataaaaaacaattttttttatattggcactagaacgattaagtttttaacctgataagatgaagaccttcttacagagaaagacttttcttaaaccctagaatgaccaacggttagaaaacacaacattaccttagtttacgttagacaaataaacaatacagtttacctcaggtacgacgtattaggggtgttaatacctttcttttatacaatcagttctcttccccagactcagagaccagttagggtttctagtgatcaaaatattaagtgacaactttcatttcttttttttttctactgataaaagacaagtacccttcttcttcttattttttttttaatgttgtcaatttatttataaataagagacaaaaaaaagaaaaaaaatattgtccatttattaaacaaattgttatctaaatttgtgtgtgtataatcattttcatttattagataggcatttcttacaatgattttaagttcatgtagactttaatttattgtgtgttatatgtgatatatatttcacaactcatgaaaattataatgattttgtaagataacatctcctatttctgaccccagaaaactcctagatatattctcattaattacgtttttatttaaacaataataataataataataataataataataaataaactatatatatagtttatttattattattattattattattatatatataatttgattgtgtgtataatttagccatattttttcttcgttaatcatgttgttcctaactaggcatcaagaccacaaaatcatgaggaaattatgatttcatacacgaatattgatcatctacgtacataaatttttgcactggtgaagcaacaacaatggtggaaatttggaatccaagaagccgtaattcacaccaccatacttctagaggaaatttaaacatgaaataatgatcgctccttttcatctctttctcactctctcgcatttacacctctctcccaccataaatgctagcaaaccctctctatacgctctgcaattactcctctgctgccacatcctcaccacctgttccctttcttcctttctcagcttcttcaaaaccttataatttgtctcctccttttcctcttccgtttctctctctgtgtgtgcccttttttctcccatcatagtttaatcatacagtcatcttaaaacccttttcagaacatagggtctctcttcaaaaaccagccagtaaaccacttgtctagccctaaaaactggttttgtagagacccaaaacctcttccatcacaaatctaatccttgtttccatggaacttcaaaggcttctatattttggtaagttgcacaccttgtctataaaacctttcaattcatttctcttcaccataagattctctcattttcagttttatatcatgtcctaatctttttcctaaacataaaaatggtgttttttattattttttgtgcaggaattgaaaatgtcgagtgggatggattgacctagatcttagtgggcgttatagtcttggtaatggtgtgttgaaatttatttgtcaaagcttcagagaggggtccatttagtgtcaactcttcatgctcatttgtttttttatataattttaatcttttggaacgtaaaactagaaaggacttgagacttttctttgaagttatgacccaaacaccctacagtcaatcctcctctcttactacttttctttgatgttatgaccgacccaaacaccctacagtcaatcctcctctcttactacttgtaataatctttttttttggcttttgctcaaacatcttgagagaatctatttcgcaaaccaaccccacatacagccaacgtaagcagcaaaatcaatcatgtcatatcctcaagagatagaaagagagaaagataaggatgctgcttagggtttgttggtgagagtaagatatgccttctacaatggagtttaaaggagaaaaaggttgtcagatttcaatcatcctctaaggttagtcaatcaggtaaggttcctctcactttggttgaggttcttaaaaagtgtttttattcactaaatatgcttaaacaaagtaattaaaacgtttccaagcaacatccttcttggaatgaacgcataacgcttttttttttttgagtaaaaagagagagagagagagagagaagagagaggaagataaaaggtgttatcttgcttatctggtgattagccatctcttgtaactacagctacgacagtgtggaatacacttcaccttgccctacaaatttcaaacaacatttattatgttgggaatttaacttggttttgctttttttcctccttgtactcttttttataattcatcaatgtttcctatcaataaatctttccatatagatgttaatttcttatctacaaacatctcatatatagcctttaatacttttctttacttgtacacatgatttactcacccctttagcatgtttacatggcattccttaggattattcttctttttttatttgcttatttatgattttttatttgcagattggaaggacagcttagcttaaaatttaagggatttatacaa

SEQ ID NO: 37 - DNA, 3091 bp, Populus trichocarpa
aattaatcttttttttgtttgatttagttcgttaatattaattttttttctatttagttatcacactctcaggatacggatcccaggtttgacgggttaacccagttgattcagaatgtttttctttttaatttggtttgcataatttttgttagagtttttggattcatacatgtgtttggaaaacacccctcaagcctatttttagtggttttattacaaagaaaaatggatgtttggccaaacaaagcctaaaatttttttaaatataaaaaaacatcttttttcttgcatatggctaaaaactcctaaagttatttaagcatttcttttataaaaaaaatttaaaatacttttatatgttttttctaaaaaaaacatattgcataaattttacaataagtttgtaaaatttctaaggattttggcctacatttcagaaatacaaaaaaaaattattttgtttcttttaatatgtgagattatgaacttatatgtaagacttattcctgctattaaataaaaaacaattttttttatattggcactagaacgattaagtttttaacctgataagatgaagaccttcttacagagaaagacttttcttaaaccctagaatgaccaacggttagaaaacacaacattaccttagtttacgttagacaaataaacaatacagtttacctcaggtacgacgtattaggggtgttaatacctttcttttatacaatcagttctcttccccagactcagagaccagttagggtttctagtgatcaaaatattaagtgacaactttcatttcttttttttttctactgataaaagacaagtacccttcttcttcttattttttttttaatgttgtcaatttatttataaataagagacaaaaaaaagaaaaaaaatattgtccatttattaaacaaattgttatctaaatttgtgtgtgtataatcattttcatttattagataggcatttcttacaatgattttaagttcatgtagactttaatttattgtgtgttatatgtgatatatatttcacaactcatgaaaattataatgattttgtaagataacatctcctatttctgaccccagaaaactcctagatatattctcattaattacgtttttatttaaacaataataataataataataataataataataaataaactatatatatagtttatttattattattattattattattatatatataatttgattgtgtgtataatttagccatattttttcttcgttaatcatgttgttcctaactaggcatcaagaccacaaaatcatgaggaaattatgatttcatacacgaatattgatcatctacgtacataaatttttgcactggtgaagcaacaacaatggtggaaatttggaatccaagaagccgtaattcacaccaccatacttctagaggaaatttaaacatgaaataatgatcgctccttttcatctctttctcactctctcgcatttacacctctctcccaccataaatgctagcaaaccctctctatacgctctgcaattactcctctgctgccacatcctcaccacctgttccctttcttcctttctcagcttcttcaaaaccttataatttgtctcctccttttcctcttccgtttctctctctgtgtgtgcccttttttctcccatcatagtttaatcatacagtcatcttaaaacccttttcagaacatagggtctctcttcaaaaaccagccagtaaaccacttgtctagccctaaaaactggttttgtagagacccaaaacctcttccatcacaaatctaatccttgtttccatggaacttcaaaggcttctatattttggtaagttgcacaccttgtctataaaacctttcaattcatttctcttcaccataagattctctcattttcagttttatatcatgtcctaatctttttcctaaacataaaaatggtgttttttattattttttgtgcaggaattgaaaatgtcgagtgggatggattgacctagatcttagtgggcgttatagtcttggtaatggtgtgttgaaatttatttgtcaaagcttcagagaggggtccatttagtgtcaactcttcatgctcatttgtttttttatataattttaatcttttggaacgtaaaactagaaaggacttgagacttttctttgaagttatgacccaaacaccctacagtcaatcctcctctcttactacttttctttgatgttatgaccgacccaaacaccctacagtcaatcctcctctcttactacttgtaataatctttttttttggcttttgctcaaacatcttgagagaatctatttcgcaaaccaaccccacatacagccaacgtaagcagcaaaatcaatcatgtcatatcctcaagagatagaaagagagaaagataaggatgctgcttagggtttgttggtgagagtaagatatgccttctacaatggagtttaaaggagaaaaaggttgtcagatttcaatcatcctctaaggttagtcaatcaggtaaggttcctctcactttggttgaggttcttaaaaagtgtttttattcactaaatatgcttaaacaaagtaattaaaacgtttccaagcaacatccttcttggaatgaacgcataacgcttttttttttttgagtaaaaagagagagagagagagagagaagagagaggaagataaaaggtgttatcttgcttatctggtgattagccatctcttgtaactacagctacgacagtgtggaatacacttcaccttgccctacaaatttcaaacaacatttattatgttgggaatttaacttggttttgctttttttcctccttgtactcttttttataattcatcaatgtttcctatcaataaatctttccatatagatgttaatttcttatctacaaacatctcatatatagcctttaatacttttctttacttgtacacatgatttactcacccctttagcatgtttacatggcattccttaggattattcttctttttttatttgcttatttatgattttttatttgcag

SEQ ID NO: 38 - DNA, 3940 bp, Medicago truncatula
tgattactctagagagtaagttttttccaacacatccaactaatatctctatgaccactcttcatacaacaaggaacactcacacacagtaagaaggcattgcgaaactcggtctaacttgttctcttctaggccactatttcaaaacaaaaaagtttctcacaaacaattgttttttaagaaattaatatgggatatattaacaacaacgataagctctttagtataaggtgtactagagaaaccatctaaaaaaataaactgtcatataaagtgcgtttgatttgctaaaaaaatgaaggacaggacagaacaactctagttgtccagtgtttgatttgtaaaactgtttcaggtacaggacaaactggaggcaagggacaggacaaaaactcatatttttgtccctcaccaaaccacaacacaactttttgtcccacgtacaaattgtctaaaataccaaaatagtattttgtccctaaaaaatcgtaaaacaaaaaaattactcaatgccataaaaaatttgtcatgtgttgttctgccttgtgttgtactgttctatcttgtactgttctgtccagtacttgttgttttgcaaaccaaacacacccataaagtatatacaagaacaaaggctagtcaatacccatacaaagcaaatgatccgactaccatctctgagaaccgtacacaaacgtggcgttattagcttttaaccaccaaaacgaattaaatttaatttatctaagagttataagataggagtttcaatgttgttgaatagcctattattgcgatcattctcacaaataataagtataatctgtatttttttttgaaggaagtataatctgtacttaatggatccaaaagttaaccataagtaactattaatttcggttggacattttttgtaacatatttacccttaaaacaccgttcttttaaaatttaaatgtaaatatacatcataattaaataggtccttaaaaaaaatcataactaaataggactattaaacaaattacaaatttaacaacaatacagttcaatccaaattcaaattttaaaaaatataaaacatgattattgaaaaataaatttagattaagatatcttgtacaattatcttatcttttttatctgaataattgtactcgtcttatctttttttaaatcatagcttgtgtacccttaaaaaaaatcataccttgtgtaaaaattcataatcatatttacatcgttccttttcattttataactaatttcttttcttttgattgcagggattgattcttcaataacttcgacaagaaagtcgttaggacgaacactttaaattgaaagacaactttcatgacgacatgttggtacttgtgaaagtggaggaatataactattttttaagctaatttcatccgctcgaacaacccaatttctttaattcggagattcgtccaagatattgaagactgtaacttggagcatcttcatattggtgcattgttgaaggacatcatctatataagttggaagcggcctcaagaaggttggaccaagctcaacatgatggtgcttgcaaagatacgagggttattgctggatgtggcgatctttttcgtgattcagacggtagatggatcaaaggctacactaagaagattggagcttgtgatgccttatatgttgagattttgatcgacatgatttctgataatttcaagttcaatgagaatattcctgttttagtttaccggatctgaaagttgccgaagatgagttgaaatgttcaactcaaccatacttgacgtgaaggaaataggagtgctgattggctcgttaacttaagcatttctacggatcactttaatttactaatgttggagtctccttctagcgaggtccaaagaatccttttagatgatttatccaggacttgcatgcctaggaatcttcgattagctttttagttctatttttttttctttgccctcttgtaaaaaaataaaaataaagatctttgaaagtacagaatgtatttatatatgtaatttttttcctcaaataccaatatatactactagtataagtagagtatatttacattatcgtagagtacgtgaatgaatataagtaaattcagtagggaagagtaaaaattaacgagtttggtagccgtcatcttttgcaccatctactctcaaatccaattttttttactacacaacacaataatctctctctctctctctctctctctctctctctctctctctctcacatagtctctctcatgtacactactagcaattactacacctcttacgcccaccattaaatgcaattgcaccatctcaatacactcagcaataactcatcactgccacaattttcctctccatccgttcactcttatttcctttctcttccttcaattcctttgtcctctcaccttcttcatcgtcttcatcttcttttcttcttctttctctctttaaacaatctactaccttttttaagctagaccgtccaaaaacactcatcaagctttcgttgcttaatttattaccatatacccaactttccataacttcctcaaaaaaaccttctcttcttttttcatattcatctttgaaaaaagtgtcttttctttttacttctttttgtgcaccatagtagatctacattttttcttcctcttctagcttctatctctctttagcaactacccttcctcttggtaagtggaaaaaaaaagtctttgttatcattaattcatttcacatctcattcacaccaatatcattgtttttgtaaaactaaatctgttcacaagtttttttcttttaaaaatacttatgtctccgtccatatagttagggttgctagaatgtcatatatttattttttgtttttttttccatcttttttctttctttctgattatgcttgttcctatgctgatttcaaatataacaaaagaatttaacatgcattttaattatgcttaaaaattcttagaagcataaagaaaaaaaatctggactttgatcaccccaatattttttagtttttggttataaagtgaggtcacgtttttatatttgagtatttttttttctctcatgttattgatgtttttgtttcctttttgaagtggcacattaatctcattgaaacaccgctaaagctgacagaagaatctaacaaagaattcatcatctgaaagccatttaaggatctaagaaaagagagagaaaaaattaaaagaaggattttctagttgaagcttttttgattgaaatatgcaagctggtttaatgattccagctagtaacatgcattcaatgatcggaagaaacaacaataacgttggtgtctttggtttatcttcatctctctctttatcccaggtgaatcttcttgtttttttttttccttcacatttctatcaaaatttttagtatattaaattaataataataataacaattttgttctaatgttaatttaatttgataaagggtcatctattttgactttatctttgcaaagataattattttctcttaagtcaacatttggtctttattgaaagaacaacctaaacaaacaaaaaaacctttcattgtattttaccagtccaagtatccttctcgttattcggaaaccgcgttattccttttcactttttcactatttaaattcattttcctcaaaaacatcaacttagtcaaattcacatgtttttctttttcatcaagtttctccaatttaattagaaaaaataaataaacaaaaattgtttttgttgattttgttttttgttgttgttgaatgtactatgtactatgtatgtactatactatatattatgtgttaaattgtttttgttagattgaaaacaataagcatttggaatcttaaagatctgtagaaa

SEQ ID NO: 39 - DNA, 3897 bp, Medicago truncatula
tgattactctagagagtaagttttttccaacacatccaactaatatctctatgaccactcttcatacaacaaggaacactcacacacagtaagaaggcattgcgaaactcggtctaacttgttctcttctaggccactatttcaaaacaaaaaagtttctcacaaacaattgttttttaagaaattaatatgggatatattaacaacaacgataagctctttagtataaggtgtactagagaaaccatctaaaaaaataaactgtcatataaagtgcgtttgatttgctaaaaaaatgaaggacaggacagaacaactctagttgtccagtgtttgatttgtaaaactgtttcaggtacaggacaaactggaggcaagggacaggacaaaaactcatatttttgtccctcaccaaaccacaacacaactttttgtcccacgtacaaattgtctaaaataccaaaatagtattttgtccctaaaaaatcgtaaaacaaaaaaattactcaatgccataaaaaatttgtcatgtgttgttctgccttgtgttgtactgttctatcttgtactgttctgtccagtacttgttgttttgcaaaccaaacacacccataaagtatatacaagaacaaaggctagtcaatacccatacaaagcaaatgatccgactaccatctctgagaaccgtacacaaacgtggcgttattagcttttaaccaccaaaacgaattaaatttaatttatctaagagttataagataggagtttcaatgttgttgaatagcctattattgcgatcattctcacaaataataagtataatctgtatttttttttgaaggaagtataatctgtacttaatggatccaaaagttaaccataagtaactattaatttcggttggacattttttgtaacatatttacccttaaaacaccgttcttttaaaatttaaatgtaaatatacatcataattaaataggtccttaaaaaaaatcataactaaataggactattaaacaaattacaaatttaacaacaatacagttcaatccaaattcaaattttaaaaaatataaaacatgattattgaaaaataaatttagattaagatatcttgtacaattatcttatcttttttatctgaataattgtactcgtcttatctttttttaaatcatagcttgtgtacccttaaaaaaaatcataccttgtgtaaaaattcataatcatatttacatcgttccttttcattttataactaatttcttttcttttgattgcagggattgattcttcaataacttcgacaagaaagtcgttaggacgaacactttaaattgaaagacaactttcatgacgacatgttggtacttgtgaaagtggaggaatataactattttttaagctaatttcatccgctcgaacaacccaatttctttaattcggagattcgtccaagatattgaagactgtaacttggagcatcttcatattggtgcattgttgaaggacatcatctatataagttggaagcggcctcaagaaggttggaccaagctcaacatgatggtgcttgcaaagatacgagggttattgctggatgtggcgatctttttcgtgattcagacggtagatggatcaaaggctacactaagaagattggagcttgtgatgccttatatgttgagattttgatcgacatgatttctgataatttcaagttcaatgagaatattcctgttttagtttaccggatctgaaagttgccgaagatgagttgaaatgttcaactcaaccatacttgacgtgaaggaaataggagtgctgattggctcgttaacttaagcatttctacggatcactttaatttactaatgttggagtctccttctagcgaggtccaaagaatccttttagatgatttatccaggacttgcatgcctaggaatcttcgattagctttttagttctatttttttttctttgccctcttgtaaaaaaataaaaataaagatctttgaaagtacagaatgtatttatatatgtaatttttttcctcaaataccaatatatactactagtataagtagagtatatttacattatcgtagagtacgtgaatgaatataagtaaattcagtagggaagagtaaaaattaacgagtttggtagccgtcatcttttgcaccatctactctcaaatccaattttttttactacacaacacaataatctctctctctctctctctctctctctctctctctctctctctcacatagtctctctcatgtacactactagcaattactacacctcttacgcccaccattaaatgcaattgcaccatctcaatacactcagcaataactcatcactgccacaattttcctctccatccgttcactcttatttcctttctcttccttcaattcctttgtcctctcaccttcttcatcgtcttcatcttcttttcttcttctttctctctttaaacaatctactaccttttttaagctagaccgtccaaaaacactcatcaagctttcgttgcttaatttattaccatatacccaactttccataacttcctcaaaaaaaccttctcttcttttttcatattcatctttgaaaaaagtgtcttttctttttacttctttttgtgcaccatagtagatctacattttttcttcctcttctagcttctatctctctttagcaactacccttcctcttggtaagtggaaaaaaaaagtctttgttatcattaattcatttcacatctcattcacaccaatatcattgtttttgtaaaactaaatctgttcacaagtttttttcttttaaaaatacttatgtctccgtccatatagttagggttgctagaatgtcatatatttattttttgtttttttttccatcttttttctttctttctgattatgcttgttcctatgctgatttcaaatataacaaaagaatttaacatgcattttaattatgcttaaaaattcttagaagcataaagaaaaaaaatctggactttgatcaccccaatattttttagtttttggttataaagtgaggtcacgtttttatatttgagtatttttttttctctcatgttattgatgtttttgtttcctttttgaagtggcacattaatctcattgaaacaccgctaaagctgacagaagaatctaacaaagaattcatcatctgaaagccatttaaggatctaagaaaagagagagaaaaaattaaaagaaggattttctagttgaagcttttttgattgaaatatgcaagctggtttaatgattccagctagtaacatgcattcaatgatcggaagaaacaacaataacgttggtgtctttggtttatcttcatctctctctttatcccaggtgaatcttcttgtttttttttttccttcacatttctatcaaaatttttagtatattaaattaataataataataacaattttgttctaatgttaatttaatttgataaagggtcatctattttgactttatctttgcaaagataattattttctcttaagtcaacatttggtctttattgaaagaacaacctaaacaaacaaaaaaacctttcattgtattttaccagtccaagtatccttctcgttattcggaaaccgcgttattccttttcactttttcactatttaaattcattttcctcaaaaacatcaacttagtcaaattcacatgtttttctttttcatcaagtttctccaatttaattagaaaaaataaataaacaaaaattgtttttgttgattttgttttttgttgttgttgaatgtactatgtactatgtatgtactatactatatattatgtgttaaattgtttttgttag

SEQ ID NO: 40 - DNA, 3000 bp, Arabidopsis thaliana
acgtacgtataactccatctatatatctgtacctacatatatacagtaaaaatcagaaataagttgggttattgtttttttatatatagttattttaaagaatctaggtaaagtataaacttactgaaaagaaaaacttgagtgttaaagctatagctataaggactttaaaaaaaaaaacaaagcttaagaactaggtaattaaatacgcagtatatttctctatatattcgcgtgataaattaagatgaatgcatggcttttacaaattatcacctttttaatgggtgatccgtattttaaatagcttaattgcacgttatagttataaatgcttgggccacaaagtaattaatatttctaggcatgtaaaatgaagtcttactgtgaaaaaagtgatatttcattgacttccttaaattgaaaaaacaattgtttcgtaaacaaaactcaaaattaaggtgatgatttttagattttcttcttttaaatgaaataaaataaatacatcactcaatcaacttctgtctgactaacaataatacaacctaaacttctataatatttaagaaaatgccatgtggaagaagaatcatgaaattttccttctttacaattaaatttataacaaagatatgaaataataataaaataaaatagttaaaaatataatagtcatattttttgaaagtaaaaattaaatttatatctcataaagataaatattaactataacaagtcattgaattttagttaaaaaactatataatttttttccatattataaataatctaagagtattaaaatttcagaaaattacttttaaaattgtatccttgacaaatggggactattgtctaactttttctgtaaatggagaactgtattaaagcaaatttcaatatagttaaatctttttttaatatagttaattttgttaagtggtgatttattgcatatgcataagttatgaataatgctaatgattttttaaaaataactacatatctaatagataaatgtaagtctcataggctcatagaccgttagccgtcattcctcaccacattataatattttaaataaataaaaaataaaattattttaggttgacattgtatataagatgaaaaacaacacataattttgtaacataaataaaataaattgtaacatatctctctctctctatatatatataagcgtgtaggataattaagtgtccctctcgcaccatttaatttcattgcaccctctcaattctctctgtcattactctctcatctctcttcctccaagatttgcacctacctttcaaaccttttgctcgccaacaaaaccgcgcttcacaaaaccatcagcggttttccgagaaacaaatctcagaccagacaccgctctactcttctctctctctccctctagggtttcgtcgcttcttcctatatcccagtgtatgtctcgaaaacctcatcatttctgctgttttctttattttatccattaattcatgtacacaaatttatttgtttaaagtatcattggatccattacacttcagttttcttagcatctttataaaactctcactttcatgatgttttttttttataatttaatatatcctgtatgttgaattttcagttagtcatctatattttgtcttaaattttgccttctttagcattaattaattgatttcttgcctctaatatctttcattcctctcctaatttgctttctgactttctgatttattgtattcttctttaaataatcttatcaatttctgcatagtcagagatgaaaccttcaagaaaacaataaagaggaaagattaaaggttagtattcccttgcctaccaaaaaaaacagaaaggtttgtattctcttcgtatatccttattttcattatacgtttggttttatatataaacacgtgtatatactttatagtagtagtatacatttacatattaatgtgtgtaataaaaacgtttaaatacgatgatgatgataagaaatagctggaaaaaattaatacatcacccaggccttatgtcacgttggttgtaagttgtataataactatatgttggtccgtcgcacaggtgcacagatataatactatttttttcatttcaatttttttttctttcttaatcgccaaatagtagtttacactttttcctgaagagtttttattttttgaaaatctactaatgattatatttaattaaattttgttttgttctcacgaaaatattgtttttttaataaacaggatagagttgggaatttatttgtacctactttttcccattttatttgctttgaacaaatgagtccaacatttctcttttcgtcttctctttcctatcccatctaaatcaaaactgatcaaaatacctcgaaattttaaattaaatcaccatccatcaaagctattatagtgtagaaattttaaagttttttctttggacaacaattgatttccatctacactacatatgatatgactcttgaatcaatcatagtttttatttcagtctgctgattagtttttttcttttcttttaaaagggtaaaaaatcggtagtttcgaataattttgagtatgtgaaaattcattatttttgggttggttattcaataacaaattaatttgtgattgtgatgtcttttttatgcaaggctcttttttcttgctttcaattagtgggtcctttgtttcctacaatcatctccaattcttctgtttgcttatatcattttgtatgatcttcaagaagaaagataaacgactccgaagaaagatttaagttattgttgttcatacaaaaagaaggttgtaaagttgttgacgtggacaaaagtattgccatatttttccagcctcgaagaaatttcccttcttcttcaaaccctaaattttgacaaaactctctacttttttttgcttctagggtttgctttcagtttccggagtataagaaaag

SEQ ID NO: 41 - DNA, 3641 bp, Glycine max
tatatcatttgtttttaatgaagttatttttggtttagtttcttttaatgaagttactataaatttaattatagttgttcaaactaatatttagtccgaacaaaatacaaattggctaccgctatgcgctatctaacaaaattttccgagtcataacatgcagatgcatgcggttcaaaattaatacttgcactcatcataaaatttgttcatatataggtaagactttccacgtcaaatataaattaaagtgcatagaacaaaaataattaaattgcaaatgtattttatggtaaattgcaattctttataataatgtactatacaatatttatttagaaaacaaaatcttgcgttacgaattaatttttttaatgtagttacgaattgaattacacggttacaagtaccatgcatttttatatgctaagagaaattcatatttttaatcaatcttttacgaagtgactagcttacacggttacactacattgtaatcaaattatattatatgtagtatcttttttcttttataaaatatattactagtaagtatcttgtgcggatacttttaaacacaaagaaaatataaaaaatacaaaaatatataattttaaaaatataaaaatataatcaacagaatgatttttcttaataatttgaaaatattttatcatgcataatgttaataaaagaaactcaagtattaattaaagaaattaaaaaactaagaaccttctttaatatgattaattgaggaaatatatcgatttaacacatttcaagaaataaaaaatacatgcttatgtaaaatattaaaaatatatataaatgttatatctccgttaaaaacacgtttaaatttagagttcaattaaaatatattgaaaatgtttttttttgtagtattatctaatactgtataaattataccatgtaagataatattcttgattcttgtaagaattactttaaaaatatatctaaacggtttgtaatcatgcaatattataaattttcttatattccgtaaaaaaataatattttattataataatatataaaatcaaactcttatattcataatataggaaatagtagtcttcaaaaaaacaggaacgaataaatcatctcaatcttatcatatcaattattaattacctaatttctttaattaattaaattatcaataaaaaaaaggtgaactttggatcaaataatataaagttatttcaaattaaccaatgttgtaaaatttggatcttaaatatacagtcacattaactttgtaaacaatcttacgcatttgagcaaggttacttccgctgaaagatgtatataagatgaatttgtttaaagttttaaaagataactttaaaataaacattttttaagtaataaatatgggccaatttgtttaaacttgaaaaaataatttaaaaataagtacttttttaaataagtagatagaatttgtgtcagtttgtttaattttatttattgaaataaatgcttattttattaaaataaataactttctatttttttaatgtgttttcctaaattatttctacttgttttaaaaagaaaatatttgcaaaaagacatttatataaaaaaattatttttaagttttttaaaaaaatttaaacaaactcaccgtttgtttcttcaaataagcggatttttttaaaaatagaaacagttaaaaaaaataaaataaacataaaaataaatattttattaaaataaatacttattttaacaaataagtttaaacaaattatcacatgatttacttcttaaaaaaacaaaaaaaaactgtttattttaagtaaaaaaagtctagacaaacacatgataaaatcataaaactacttattttatttttaaaaaaatacttattttaaaaatatgctttaaaataattagctcataatttgcatcaaaaatcacaactcacgaattgggagtgaataaattaatagtaattagcttggctctttttcttattttttactccctattttccttttttataaggcttactagactcttttgcatgaccagcgtctctggtcaaaagaattaataataataataataataaaattcattaaaaatcacattaaaagaatattaataatcacattaaaaacatatttaaaatcacattaaagcacattaatgacattttcaatagtactaagaactctttcaattcttgaaccaatattactcttatcttaatggaaaatactctacacttatccgaacgaaaaaactgcaaaagagaagaagaaatgaatggagtgacacgcacaaattaatttcaagataccagcacttagcaatttagcatttgtttggtagccgtcattcgttgcattgcattgcatttgcatttgcattgcaccgtcaactcgcaaaatatttataagttttatactacaccaaaccaaaaaatatgctgcgtctctttctctctcccctctctagcaattacacctcttttgccctccattaaatgcaattgcaccctctcaatacgctctgcaattactcttcgctgccacattttcctccatctgttccccacttctctctctccttcaatgcccttgtccctctctcttcttcttcttcttcttcttctcactttctctctgtaacaccttctcttcatgatatagcttcttcaccttttttttctttcttttctttgttaccatatataagtaaactagattccataactgtcccaagcccttccttcaaaagggtcctctcttttcaacccaaaacagatctacaccttcatcttccaccaccactctcactggtaagtgctaaaaaatattgataataaaagcttctgtcgcaaccagggtcgcggcgtgtttgtgtggaacattcatgttttgttaaggttctctaaggtcacatttgtttttttttttttttaaacgaaactaatgaagctgtttggtacattttgtgagttctactaacattttccgggtgagtcgcttgcagctagggctgtgagaaaaggaacgttattaggtctgtaagaaaaaagaaaatatcctgaaatataggatgcgttgtaggattctccgagatcttcgtgttgttttattttataaataaaaaagttttgattttgttttgtgaaaaggcaaaagatcagataagggttacaatatttcttttcttttttattctgtttacatatattgatgatatatatatgcatagcgtatatttgtttcgaaattttgataagtttttatctttttaattttttttcggccgtttgtataactgagttttgtagtaacacactgactcgctttgacattgtcatctgacagaatccaagggctcaacctcttaagctttttctctatccaagaacctcttaagagagagaaagaataagagaaagagaaagtgagagagccaattctacatttgttggtggtggtttttgaggcatgtgaaataatccaagggctcaacctcttaagctttttctctatccaagaacctcttaagagagagaaagaataagagaaagagaaagtgagagagccaattctacatttgttggtggtggtttttgaggcatgtgaaat

SEQ ID NO: 42 - DNA, 3509 bp, Glycine max
tatatcatttgtttttaatgaagttatttttggtttagtttcttttaatgaagttactataaatttaattatagttgttcaaactaatatttagtccgaacaaaatacaaattggctaccgctatgcgctatctaacaaaattttccgagtcataacatgcagatgcatgcggttcaaaattaatacttgcactcatcataaaatttgttcatatataggtaagactttccacgtcaaatataaattaaagtgcatagaacaaaaataattaaattgcaaatgtattttatggtaaattgcaattctttataataatgtactatacaatatttatttagaaaacaaaatcttgcgttacgaattaatttttttaatgtagttacgaattgaattacacggttacaagtaccatgcatttttatatgctaagagaaattcatatttttaatcaatcttttacgaagtgactagcttacacggttacactacattgtaatcaaattatattatatgtagtatcttttttcttttataaaatatattactagtaagtatcttgtgcggatacttttaaacacaaagaaaatataaaaaatacaaaaatatataattttaaaaatataaaaatataatcaacagaatgatttttcttaataatttgaaaatattttatcatgcataatgttaataaaagaaactcaagtattaattaaagaaattaaaaaactaagaaccttctttaatatgattaattgaggaaatatatcgatttaacacatttcaagaaataaaaaatacatgcttatgtaaaatattaaaaatatatataaatgttatatctccgttaaaaacacgtttaaatttagagttcaattaaaatatattgaaaatgtttttttttgtagtattatctaatactgtataaattataccatgtaagataatattcttgattcttgtaagaattactttaaaaatatatctaaacggtttgtaatcatgcaatattataaattttcttatattccgtaaaaaaataatattttattataataatatataaaatcaaactcttatattcataatataggaaatagtagtcttcaaaaaaacaggaacgaataaatcatctcaatcttatcatatcaattattaattacctaatttctttaattaattaaattatcaataaaaaaaaggtgaactttggatcaaataatataaagttatttcaaattaaccaatgttgtaaaatttggatcttaaatatacagtcacattaactttgtaaacaatcttacgcatttgagcaaggttacttccgctgaaagatgtatataagatgaatttgtttaaagttttaaaagataactttaaaataaacattttttaagtaataaatatgggccaatttgtttaaacttgaaaaaataatttaaaaataagtacttttttaaataagtagatagaatttgtgtcagtttgtttaattttatttattgaaataaatgcttattttattaaaataaataactttctatttttttaatgtgttttcctaaattatttctacttgttttaaaaagaaaatatttgcaaaaagacatttatataaaaaaattatttttaagttttttaaaaaaatttaaacaaactcaccgtttgtttcttcaaataagcggatttttttaaaaatagaaacagttaaaaaaaataaaataaacataaaaataaatattttattaaaataaatacttattttaacaaataagtttaaacaaattatcacatgatttacttcttaaaaaaacaaaaaaaaactgtttattttaagtaaaaaaagtctagacaaacacatgataaaatcataaaactacttattttatttttaaaaaaatacttattttaaaaatatgctttaaaataattagctcataatttgcatcaaaaatcacaactcacgaattgggagtgaataaattaatagtaattagcttggctctttttcttattttttactccctattttccttttttataaggcttactagactcttttgcatgaccagcgtctctggtcaaaagaattaataataataataataataaaattcattaaaaatcacattaaaagaatattaataatcacattaaaaacatatttaaaatcacattaaagcacattaatgacattttcaatagtactaagaactctttcaattcttgaaccaatattactcttatcttaatggaaaatactctacacttatccgaacgaaaaaactgcaaaagagaagaagaaatgaatggagtgacacgcacaaattaatttcaagataccagcacttagcaatttagcatttgtttggtagccgtcattcgttgcattgcattgcatttgcatttgcattgcaccgtcaactcgcaaaatatttataagttttatactacaccaaaccaaaaaatatgctgcgtctctttctctctcccctctctagcaattacacctcttttgccctccattaaatgcaattgcaccctctcaatacgctctgcaattactcttcgctgccacattttcctccatctgttccccacttctctctctccttcaatgcccttgtccctctctcttcttcttcttcttcttcttctcactttctctctgtaacaccttctcttcatgatatagcttcttcaccttttttttctttcttttctttgttaccatatataagtaaactagattccataactgtcccaagcccttccttcaaaagggtcctctcttttcaacccaaaacagatctacaccttcatcttccaccaccactctcactggtaagtgctaaaaaatattgataataaaagcttctgtcgcaaccagggtcgcggcgtgtttgtgtggaacattcatgttttgttaaggttctctaaggtcacatttgtttttttttttttttaaacgaaactaatgaagctgtttggtacattttgtgagttctactaacattttccgggtgagtcgcttgcagctagggctgtgagaaaaggaacgttattaggtctgtaagaaaaaagaaaatatcctgaaatataggatgcgttgtaggattctccgagatcttcgtgttgttttattttataaataaaaaagttttgattttgttttgtgaaaaggcaaaagatcagataagggttacaatatttcttttcttttttattctgtttacatatattgatgatatatatatgcatagcgtatatttgtttcgaaattttgataagtttttatctttttaattttttttcggccgtttgtataactgagttttgtagtaacacactgactcgctttgacattgtcatctgacagaatccaagggctcaacctcttaagctttttctctatccaagaacctcttaagagagagaaagaataagagaaagagaaagtgagagagccaattctacatttgttggtggtggtttttgaggcatgtgaaat

SEQ ID NO: 43 - DNA, 3000 bp, Sorghum bicolor
ttcactactttattattttctgagcaggaaaaagttatgtttcctttgcaaaaaatgggacccacacgcacggcaagaagccgtgccgtgccgtgccgcggcatggaaacagtactacactccaggactgcatgcactccgttgcagtgaaccatgcatcgatctcttcgcccgttcctctggaaactcataacttttttttttaaagagagaaacccctcaaacaaattaaattggatcatttgcacggatttcatcttgccggtcgtctgttgtgtatactgcaaatgagaattacgtattttgtggaagtccttcgtcttgtttttttatccttggccttgtttagtttcgaaaaatttcggatttcgctattataacactttagtttttatttgacaaatattgtctaatcatgaactaactatgatcaaaagatttatctcgcgatttacaaacaaattgtgtaattagtttttatttttgtttatatttaatgatttatgcatttgccgcaagattcgatgtgacggagaatcttgaaaactttttggatctctgagggaactaaacaacgcccttgtctaacacatgtatccccaatttcatcttgacggagggatataacgatcgagtcaaacctctgcatggatgggtgcactattggcgtgtagcagtatatggcgccaggaaaaagttaaaactaaagaaatggatcttttaacaagtactccctccgtcagcaacatgccggagctgtgtttaaagttagttttaatgaagttttattaaagttttatacatattaaatatgctgatgtaacattgtattgatgaagagagatgataaaaattttatgagataaagttttattctaataaaactcttctgcactatttctaaatatgactgcgttaaaaattgagtcatgaaatccgccgtcgaggatggcctaaagggcactcacaatgcagactctatcatagagtctaaggttatttattacctcgaacaatgtggacttagagtctaaataagacttggagtcttattttttctatctttttcttcaataaatataatgacatatcaacaaaatatcataaataatatgtaattaattgtcttagactctatgatagagttttgcattgtgaggctagtctcaatgcatgtttcatgagagtgtcatgcacattaaatagggtgtcacataagcaaaattgctgacttggcagggtcattaaatgaaggagtttcatcagatgagagagaagtttcatcctcatgaaactcatatggctcgattatctagtttatagtcttggtaactgtaccatgaaactatacattgacactggctgagtgtcctagcatggctcttatcctttggccagaactgaagagacgctatgtatatccatggctatctggaactttcctctctccatcactcagtaattacgccggttatctaatctgaaacatttgtcaatgtactgagtattcagcagaaaacgtaccacctgccgaagtactatatcgtagccgcgattaattgactaataagacaattgaaaaatagactgatattaccctcttagcctataaaagaatgtaactatgaaaccggtcaaactaatttaaatttaattagatttatagtaaataatattagtatttatatctttaaataaatttataataaaactgtattctataacaaacatatattctataactaatttaataatatttattttatataataatagataacattttttatataaatttagtcaaagtttaaacgatcgatctcgttacttaaaaaataaggagtagttagtatttttttattcgagttacagtactaaatgatatataagtctatctctacatggaaatgcatgatcatcgacttgccagcctttattttctcctctccttcatgatgactatacatagctcgaaaataaattaatatatatgtcatgcagatacatgaacgttcattttcacattcatttgccaaaaaaactacatatgacgacgtccaataaatccaaaacacatgacatatcgtgcatgtttctccttatatacaagtactataccaggccttgtttagttccaattttttttgcaaaatagaaatagtagcactttcgtttgtatttgataaatattgtctaatcatgaactaactagtctcaaaatattcgtctcgtcaatttcgtccaaactgtgcaattagtttttattttcgtctatatttaatacttcatgcatgcgtctaaagatttgatgtgatggagaatctgaaaaattttgcaaaattttttgggaactaaacaaggccccaatatacttgtagaaatagaaatatataataataaaaaatcatgcatccgtctctctctcgctctgctagcaattacgatacggcctctcaataaatgcggattgcaccacctcaacactcgtccgcaataactccttcctcccttctccacattctcttccacctccgtccgttcccctccccttcctcttcctctcctcccccttccatggccgccgcttagcttcgttctcaaggcctcctccctctcgccacacacctcctgctagctacccttctgagcttgcaaagttttgccgcatcacatcgatcttgagagctgcagcaggcagagatcgatcagagttctatttttgcagaggcacacaaacatatatagttcctgtatctgctagatctcactgccagccagctcgcagtgaagcttctctgggctaccttgtcgctagatctgttgctggtcgtgctgttacttggcaggcaaggtatacatctccatataggaataggattggcgccgcctgttttcttgggttgtgagggagatatactacgcatgtgccagtgaataaatgggaagcagctagtgaggaggcaataagaatcagggtttgagaggtcgcgagaggagaaa

SEQ ID NO: 44 - DNA, 2500 bp, Sorghum bicolor
ttcactactttattattttctgagcaggaaaaagttatgtttcctttgcaaaaaatgggacccacacgcacggcaagaagccgtgccgtgccgtgccgcggcatggaaacagtactacactccaggactgcatgcactccgttgcagtgaaccatgcatcgatctcttcgcccgttcctctggaaactcataacttttttttttaaagagagaaacccctcaaacaaattaaattggatcatttgcacggatttcatcttgccggtcgtctgttgtgtatactgcaaatgagaattacgtattttgtggaagtccttcgtcttgtttttttatccttggccttgtttagtttcgaaaaatttcggatttcgctattataacactttagtttttatttgacaaatattgtctaatcatgaactaactatgatcaaaagatttatctcgcgatttacaaacaaattgtgtaattagtttttatttttgtttatatttaatgatttatgcatttgccgcaagattcgatgtgacggagaatcttgaaaactttttggatctctgagggaactaaacaacgcccttgtctaacacatgtatccccaatttcatcttgacggagggatataacgatcgagtcaaacctctgcatggatgggtgcactattggcgtgtagcagtatatggcgccaggaaaaagttaaaactaaagaaatggatcttttaacaagtactccctccgtcagcaacatgccggagctgtgtttaaagttagttttaatgaagttttattaaagttttatacatattaaatatgctgatgtaacattgtattgatgaagagagatgataaaaattttatgagataaagttttattctaataaaactcttctgcactatttctaaatatgactgcgttaaaaattgagtcatgaaatccgccgtcgaggatggcctaaagggcactcacaatgcagactctatcatagagtctaaggttatttattacctcgaacaatgtggacttagagtctaaataagacttggagtcttattttttctatctttttcttcaataaatataatgacatatcaacaaaatatcataaataatatgtaattaattgtcttagactctatgatagagttttgcattgtgaggctagtctcaatgcatgtttcatgagagtgtcatgcacattaaatagggtgtcacataagcaaaattgctgacttggcagggtcattaaatgaaggagtttcatcagatgagagagaagtttcatcctcatgaaactcatatggctcgattatctagtttatagtcttggtaactgtaccatgaaactatacattgacactggctgagtgtcctagcatggctcttatcctttggccagaactgaagagacgctatgtatatccatggctatctggaactttcctctctccatcactcagtaattacgccggttatctaatctgaaacatttgtcaatgtactgagtattcagcagaaaacgtaccacctgccgaagtactatatcgtagccgcgattaattgactaataagacaattgaaaaatagactgatattaccctcttagcctataaaagaatgtaactatgaaaccggtcaaactaatttaaatttaattagatttatagtaaataatattagtatttatatctttaaataaatttataataaaactgtattctataacaaacatatattctataactaatttaataatatttattttatataataatagataacattttttatataaatttagtcaaagtttaaacgatcgatctcgttacttaaaaaataaggagtagttagtatttttttattcgagttacagtactaaatgatatataagtctatctctacatggaaatgcatgatcatcgacttgccagcctttattttctcctctccttcatgatgactatacatagctcgaaaataaattaatatatatgtcatgcagatacatgaacgttcattttcacattcatttgccaaaaaaactacatatgacgacgtccaataaatccaaaacacatgacatatcgtgcatgtttctccttatatacaagtactataccaggccttgtttagttccaattttttttgcaaaatagaaatagtagcactttcgtttgtatttgataaatattgtctaatcatgaactaactagtctcaaaatattcgtctcgtcaatttcgtccaaactgtgcaattagtttttattttcgtctatatttaatacttcatgcatgcgtctaaagatttgatgtgatggagaatctgaaaaattttgcaaaattttttgggaactaaacaaggccccaatatacttgtagaaatagaaatatataataataaaaaatcatgcatccgtctctctctcgctctgctagcaattacgatacggcctctcaataaatgcggattgcaccacctcaacactcgtccgcaataactc

SEQ ID NO: 45 - DNA, 1204 bp, Arabidopsis thaliana
atatcggttgttgacgattaaccatgcaaaaaagaaacattaattgcgaatgtaaataacaaaacatgtaactcttgtagatatacatgtatcgacatttaaacccgaatatatatgtatacctataatttctctgattttcacgctacctgccacgtacatgggtgataggtccaaactcacaagtaaaagtttacgtacagtgaattcgtctttttgggtataaacgtacatttaatttacacgtaagaaaggattaccaattctttcatttatggtaccagacagagttaaggcaaacaagagaaacatatagagttttgatatgttttcttggataaatattaaattgatgcaatatttagggatggacacaaggtaatatatgccttttaaggtatatgtgctatatgaatcgtttcgcatgggtactaaaattatttgtccttactttatataaacaaattccaacaaaatcaagtttttgctaaaactagtttatttgcgggttatttaattacctatcatattacttgtaatatcattcgtatgttaacgggtaaaccaaaccaaaccggatattgaactattaaaaatcttgtaaatttgacacaaactaatgaatatctaaattatgttactgctatgataacgaccatttttgtttttgagaaccataatataaattacaggtacgtgacaagtactaagtatttatatccacctttagtcacagtaccaatattgcgcctaccgggcaacgtgaacgtgatcatcaaatcaaagtagttaccaaacgctttgatctcgataaaactaaaagctgacacgtcttgctgtttcttaatttatttctcttacaacgacaattttgagaaatatgaaatttttatatcgaaagggaacagtccttatcatttgctcccatcacttgcttttgtctagttacaactggaaatcgaagagaagtattacaaaaacatttttctcgtcatttataaaaaaatgacaaaaaattaaatagagagcaaagcaagagcgttgggtgacgttggtctcttcattaactcctctcatctaccccttcctctgttcgcctttatatccttcaccttccctctctcatcttcattaactcatcttcaaaaataccctaatcacattttgtaacaataatacaattatacattaaaactctccgacg

SEQ ID NO: 46 - DNA, 2605 bp, Arabidopsis thaliana
tgaccaaattctagaagtgacttgataacatgagaggctataaagctggttcctccggtaaccaagtactctgccattttattaggctcctctgattttgtgtaacattgacaaactagatcatgcgattagatggtctaattttattttattttgtgttagaaggatgttcaatcctggttgatttagtttatgtttgacttttttttatgtagtctttgaataatagtagttacatctaactttcataaagacttggattagtataacctaattataagctttgggcttgaagcaaatataatgaactgaatgtgggcttttaaagtatccaaagaggtttatgaaatgtgatatattttttttggtcttcaatctcttgaaaattggttagcaatccattggcagttgaaggctctctcagagaccttgactagaaggcctcaaaggcaaaggaaggtggaaggaaaaatcaaaattcccggagctgaaagttgacacaaaggaatcaacctagttctttcttgtcttagcttttttgaagggaaatgaaaattgacacaaaagaaggtggaaggaaaaatatgatgcttgtcctttattggacatatcattttgcagaatatatattcttcctagcattttgcatgcattgtgtctaggttgtcatgttgtggctggtttactaagttcctagtacaatgaacaaagcgccagagctgaaagttgaaataacaatcgtcaacatcccaaccgccttaacattaaaaccaaccaaaaaaacaaaaacacatcccaaccgaaagcagcaatccaggaagattagtttatgtaaatgacaaacataaatatgaaaccgtcacatagttgagagtcgccgtgaatatttactttttaaataaaaagatatggttagccgctggttggtctgacaccccatgtatcattatactcattatccgtatgaaggaccattttttcatataaggatatacacgtttgtaacgtatgcagagccaacaccaagtatataacttgtactgtcgtctctgattctgttaaagcggttaactagattattgactatgataattcaatgtaacaccaatttatgccccggacaaaaaaaaaatggtgaaaccaaaatatttgatttgcatcccagttactatttccctgcaatgatatgggggcggcggtttggagatatcgccaatgccacaatttgtcgtaaaaacagttaaacattttactcactagtcactccccacaaaaaaaacgatacttagttccactctctactactacaaaacttgtatacattaaaaaacgatttttattgagtagacattaatgatcggcttataagtctaaacaagtaatgtgacagaattcacgtgaacaaatgctcgagtgggatgtttttattgcttctcaagttggtgatctttaatatcgccaagattaggttgtgcattaaatttggattactttttataaattaaatcaagatatggatatgataaactttctctcttttcttttagttaacatactttatagactttatactacattagattaattgcagatttaaacaatgtttaaaattacaaaaacgttaaatgtcatattttccatataaattttgttttacgtaaaagcaatttacatgaattttgataaaatcatgaaaaaacagaagcggtgtccaagattggggatgaatgagaaaacaccgcactgatagtaactgaaaagaatgtaaccagtctcacgatggggatggcggagagaaagagagagacaagacagtagagaaaagaaggtacgacggagagatgaaggttggacagagagaacaaaacgagaacggcaatggccgggaaaaaaggagagtagggaggaaaaaaaaaagaattttgtttttttagcttttgtagggttttttgttagtcgtaaaatataaattataatatcaaagaaaataatgagttaattttaaagaaggttagatgatatttttcacaagtttttgttgatatagtaaacccacaattttattttgtcattcaaagtaaattttcaacaaaatatagctgttgctggtcacattttaacgggaaaaaataattcttgtacctggatgtataacctctgaaccttgtattacaaatttacaaaacacattgatctcaatcagaccgaacatgtatatcgagtcaactgacaaatctcttttcctactcttgttacatattctttctaggaaaaaaaaatgctttcaggctcaatgaaatgaattaaaacagcaaaaggttggtaaaagtctttttccccataatcatttgctccataattgacgtttgtctggcaacaactggaaacacagatatagaaaaaaagattggacagtaaatcataaaaaaaaaaaagcaaaattaaatagaaagacgaagcgagagaaagagcgttgagtggcgtgagagtttgagtccgaaaattaactcctctcccatctgccaactttcctctgtttctcctttatatcccaaacctattcttcctccacacctcatcataggcatagcaaaactcttccaaa

SEQ ID NO: 47 - DNA, 2500 bp, Arabidopsis thaliana
tgaccaaattctagaagtgacttgataacatgagaggctataaagctggttcctccggtaaccaagtactctgccattttattaggctcctctgattttgtgtaacattgacaaactagatcatgcgattagatggtctaattttattttattttgtgttagaaggatgttcaatcctggttgatttagtttatgtttgacttttttttatgtagtctttgaataatagtagttacatctaactttcataaagacttggattagtataacctaattataagctttgggcttgaagcaaatataatgaactgaatgtgggcttttaaagtatccaaagaggtttatgaaatgtgatatattttttttggtcttcaatctcttgaaaattggttagcaatccattggcagttgaaggctctctcagagaccttgactagaaggcctcaaaggcaaaggaaggtggaaggaaaaatcaaaattcccggagctgaaagttgacacaaaggaatcaacctagttctttcttgtcttagcttttttgaagggaaatgaaaattgacacaaaagaaggtggaaggaaaaatatgatgcttgtcctttattggacatatcattttgcagaatatatattcttcctagcattttgcatgcattgtgtctaggttgtcatgttgtggctggtttactaagttcctagtacaatgaacaaagcgccagagctgaaagttgaaataacaatcgtcaacatcccaaccgccttaacattaaaaccaaccaaaaaaacaaaaacacatcccaaccgaaagcagcaatccaggaagattagtttatgtaaatgacaaacataaatatgaaaccgtcacatagttgagagtcgccgtgaatatttactttttaaataaaaagatatggttagccgctggttggtctgacaccccatgtatcattatactcattatccgtatgaaggaccattttttcatataaggatatacacgtttgtaacgtatgcagagccaacaccaagtatataacttgtactgtcgtctctgattctgttaaagcggttaactagattattgactatgataattcaatgtaacaccaatttatgccccggacaaaaaaaaaatggtgaaaccaaaatatttgatttgcatcccagttactatttccctgcaatgatatgggggcggcggtttggagatatcgccaatgccacaatttgtcgtaaaaacagttaaacattttactcactagtcactccccacaaaaaaaacgatacttagttccactctctactactacaaaacttgtatacattaaaaaacgatttttattgagtagacattaatgatcggcttataagtctaaacaagtaatgtgacagaattcacgtgaacaaatgctcgagtgggatgtttttattgcttctcaagttggtgatctttaatatcgccaagattaggttgtgcattaaatttggattactttttataaattaaatcaagatatggatatgataaactttctctcttttcttttagttaacatactttatagactttatactacattagattaattgcagatttaaacaatgtttaaaattacaaaaacgttaaatgtcatattttccatataaattttgttttacgtaaaagcaatttacatgaattttgataaaatcatgaaaaaacagaagcggtgtccaagattggggatgaatgagaaaacaccgcactgatagtaactgaaaagaatgtaaccagtctcacgatggggatggcggagagaaagagagagacaagacagtagagaaaagaaggtacgacggagagatgaaggttggacagagagaacaaaacgagaacggcaatggccgggaaaaaaggagagtagggaggaaaaaaaaaagaattttgtttttttagcttttgtagggttttttgttagtcgtaaaatataaattataatatcaaagaaaataatgagttaattttaaagaaggttagatgatatttttcacaagtttttgttgatatagtaaacccacaattttattttgtcattcaaagtaaattttcaacaaaatatagctgttgctggtcacattttaacgggaaaaaataattcttgtacctggatgtataacctctgaaccttgtattacaaatttacaaaacacattgatctcaatcagaccgaacatgtatatcgagtcaactgacaaatctcttttcctactcttgttacatattctttctaggaaaaaaaaatgctttcaggctcaatgaaatgaattaaaacagcaaaaggttggtaaaagtctttttccccataatcatttgctccataattgacgtttgtctggcaacaactggaaacacagatatagaaaaaaagattggacagtaaatcataaaaaaaaaaaagcaaaattaaatagaaagacgaagcgagagaaagagcgttgagtggcgtgagagtttgagtccga

SEQ ID NO: 48 - DNA, 3455 bp, Glycine max
gagtatttattgagagaatacttgcgagattctttttaatatgttatttactaattattattatttaaaatttattagaaatattttttaaatctcatttcttctattaattttaatcaataaaaaagaaaaaatatattaaaaagtatgctacatatctcatttgttaaaataagagtttattaacttaggagagttttcataagttcacaatttaatttgattctgaataaaaaaaaaagcttatagaatatttgtataactaattaagtctaaataaattttacataaattgtttcaaaccctctaatatatgcactagctcctaactatcttttattatatttaattgcaattttaatgaaatcctcttttgtttcagaagcttatagaataattattttcatttaataaatggtttttatgattctgatgtaatattttaattattttctctctctctctctctctctccctatatatatatatatatatatatatatatatatatatatatatatatatatatatatatatatatatatatattctcctaacaaacctttaaggatttatccaccgctgcatatgccaggctgaaaaacaattatttcattttcgtgggtgtatatataaaaaaaacttgtggaataagagaggtgttgatcgatgagctgtaataaccttcaatcttgagcttcaaacaaactcaagttatggtcttccctatagctagctaatattttttggtgttgatagctagctaatattttggactgcactgtttacactcaacagttcaatttacaccaacttaaccaacaaatcttccttcgattttctgctgcccattgaaactctgcatgtcaaaatgctacttgtcacaaataaaaaaggttgagaaaaaggataataagggaataacaacaatatatacaacatgagcatccgtttactatacgctgcttaatgtcatgcacagtacttatctaagcaaatttttttgacaagatgtgaatgatgtaacaataaacatttcatctctttctataatatatacttagttaggttattatattcgtacaatcagcttctgtatcattttatttccactctcttttttatcttgttttttttcatttctcatcatatttaccaattttttgataaaaaataaccatatttaccgatttttctctctttaatttatttttattttttttatccctctatgtttatctttcttgcacagttgcacttgtaaataatacccttataacttttttcctatatactttcgcaattataatacgcggtttgtctgtccgttgactgttgctatatgtagtatatagcagtacttatttatttattttatcagtacagtacttatttatttcagtgtacgaaagcggttgtttttattttcagatttaaatttgaattcaacctcgtcataatccccaatccaagaacaaagacaaaatttagaagggtacggagaacttaaagtctcacaaatccttttttaattccggatatccacaaattaaccggaagtaggactaattcctgaaaatattaaaatgtatttagtttagggaattaattttttctataaatatttttaatttaatacatatagatgtcgaaattatattaaacctctaattacaaacatataatgatattgagatatacatgattgatcaggagttaaaaatataaaaacaaaaaaagtgaatgaagaaaaaaaaaagaaaataaattgtgagtttaaatttttccagtgatattttaaaaaaataataataaattaatatttatcgtcgataatattagtatctcttactccccttgctctataggctcgaacttattatgattgatggttgtcattcatatgttccactaataaaaggagtaagattgacaaatgaataactagttaaggtgagtgcattaaatcagtaagatacaatactcgttataaattattaaatgaacgaatagtcaatgcttgactgttgacaacctttgaatagtcaatgttatctatttatccttagatggactttggcaacattgatgttaatccagagtggaatgtaaagttttaacgcatagcatgtctaaaatgatatgtatgtagtgtagaatctttatatgtgttatttttttttataaagatgaataatcaataataaagtttatgactgttttccattgatgttatgataaaattaaataaataaatccaaggcaatcacttcaaagacgttataattagacaatatcagcttcttcttctttttttctaaaaatgataaggataaataagtatgaattaatcataacagcacatctttttgtactaaaagatgattcattttaaaaaggtaagcattacgttacgaataaatttgttttcatgatattttgtttgtatgcaacatatttttcaatacaaaaatatttttatataattcaaactaaacataattttaaaattattttttagctaacacaataaaatttatataattaatttaaaaaataattgtgaacaaaataaatcagtaaataattttttcattataagatagcctaaaattattttttataagatttgtgtaaaaataatatataataaaagaaaatatgttaaaaactgagcaatgctattgggtacaaatagcataaacacaaaaccaaacgactagaaacgtgacttaatattatttttaaaaaatatatatattaattaacttttttcataaatataaaataggttttggtagaaatcacagttgatgcaaaaccaattcgtacaagacagcattttcctttaaaaaaattgtgtatatttgcctcagccacacgaaagcctaattaataagttatctcattttggaagtacgttgtatctacatgtgaacgtatttaaatgtaactaaatccatgtttaatgaaactttcggcgttgatctgacacatggttttattttaattttttttcgtttggatccatgagattgaggtgtgggtgcactttttttggtttgtgttttattatcattgttataagatcacacagacgcacgtacggagaggagagatatagaagtagttgcaattgcaaagaaggccgtgtcccaatttccctttgaaagcacaaatttaatgatgaaaggaagagaagaaataaaagtatgtttacgggtgttagggtttagttagatgtggaaggggtggagttatgaaaattaataccaagttaagtgagcgttgagtgacgtgaagtcttacattaatacctctcatctgccccgttcagaccttagggtcccttggcctttaaaacctcaccacccctacactgagttattatcattcaagcaccattcttctcgatcttctctttctcaaccgaaccaaattacagatttaacaag

SEQ ID NO: 49 - DNA, 3000 bp, Glycine max
gagtatttattgagagaatacttgcgagattctttttaatatgttatttactaattattattatttaaaatttattagaaatattttttaaatctcatttcttctattaattttaatcaataaaaaagaaaaaatatattaaaaagtatgctacatatctcatttgttaaaataagagtttattaacttaggagagttttcataagttcacaatttaatttgattctgaataaaaaaaaaagcttatagaatatttgtataactaattaagtctaaataaattttacataaattgtttcaaaccctctaatatatgcactagctcctaactatcttttattatatttaattgcaattttaatgaaatcctcttttgtttcagaagcttatagaataattattttcatttaataaatggtttttatgattctgatgtaatattttaattattttctctctctctctctctctctccctatatatatatatatatatatatatatatatatatatatatatatatatatatatatatatatatatatatattctcctaacaaacctttaaggatttatccaccgctgcatatgccaggctgaaaaacaattatttcattttcgtgggtgtatatataaaaaaaacttgtggaataagagaggtgttgatcgatgagctgtaataaccttcaatcttgagcttcaaacaaactcaagttatggtcttccctatagctagctaatattttttggtgttgatagctagctaatattttggactgcactgtttacactcaacagttcaatttacaccaacttaaccaacaaatcttccttcgattttctgctgcccattgaaactctgcatgtcaaaatgctacttgtcacaaataaaaaaggttgagaaaaaggataataagggaataacaacaatatatacaacatgagcatccgtttactatacgctgcttaatgtcatgcacagtacttatctaagcaaatttttttgacaagatgtgaatgatgtaacaataaacatttcatctctttctataatatatacttagttaggttattatattcgtacaatcagcttctgtatcattttatttccactctcttttttatcttgttttttttcatttctcatcatatttaccaattttttgataaaaaataaccatatttaccgatttttctctctttaatttatttttattttttttatccctctatgtttatctttcttgcacagttgcacttgtaaataatacccttataacttttttcctatatactttcgcaattataatacgcggtttgtctgtccgttgactgttgctatatgtagtatatagcagtacttatttatttattttatcagtacagtacttatttatttcagtgtacgaaagcggttgtttttattttcagatttaaatttgaattcaacctcgtcataatccccaatccaagaacaaagacaaaatttagaagggtacggagaacttaaagtctcacaaatccttttttaattccggatatccacaaattaaccggaagtaggactaattcctgaaaatattaaaatgtatttagtttagggaattaattttttctataaatatttttaatttaatacatatagatgtcgaaattatattaaacctctaattacaaacatataatgatattgagatatacatgattgatcaggagttaaaaatataaaaacaaaaaaagtgaatgaagaaaaaaaaaagaaaataaattgtgagtttaaatttttccagtgatattttaaaaaaataataataaattaatatttatcgtcgataatattagtatctcttactccccttgctctataggctcgaacttattatgattgatggttgtcattcatatgttccactaataaaaggagtaagattgacaaatgaataactagttaaggtgagtgcattaaatcagtaagatacaatactcgttataaattattaaatgaacgaatagtcaatgcttgactgttgacaacctttgaatagtcaatgttatctatttatccttagatggactttggcaacattgatgttaatccagagtggaatgtaaagttttaacgcatagcatgtctaaaatgatatgtatgtagtgtagaatctttatatgtgttatttttttttataaagatgaataatcaataataaagtttatgactgttttccattgatgttatgataaaattaaataaataaatccaaggcaatcacttcaaagacgttataattagacaatatcagcttcttcttctttttttctaaaaatgataaggataaataagtatgaattaatcataacagcacatctttttgtactaaaagatgattcattttaaaaaggtaagcattacgttacgaataaatttgttttcatgatattttgtttgtatgcaacatatttttcaatacaaaaatatttttatataattcaaactaaacataattttaaaattattttttagctaacacaataaaatttatataattaatttaaaaaataattgtgaacaaaataaatcagtaaataattttttcattataagatagcctaaaattattttttataagatttgtgtaaaaataatatataataaaagaaaatatgttaaaaactgagcaatgctattgggtacaaatagcataaacacaaaaccaaacgactagaaacgtgacttaatattatttttaaaaaatatatatattaattaacttttttcataaatataaaataggttttggtagaaatcacagttgatgcaaaaccaattcgtacaagacagcattttcctttaaaaaaattgtgtatatttgcctcagccacacgaaagcctaattaataagttatctcattttggaagtacgttgtatctacatgtgaacgtatttaaatgtaactaaatccatgtttaatgaaactttcggcgttgatctgacacatggt

SEQ ID NO: 50 - DNA, 3138 bp, Populus trichocarpa
aaaaaggaaattaactaatattatatatatagtgaattcttaaaaatacgtccctcaatatgataaacattgttatatcgatcgggaaatatagttttagtgttcctagtatttttaaaaagaggtgccttcgtccaactaatcaaaatacgagagtcaaactatgagagttacatataatttggtgtcagagtagaatggcatgaagttatggctgctaaactttagctgactgtctgtttcatagcctaatttagccaacacctcaagttcctctctcctgatggcatctgctgctatctctatcctcatagcttttaacccatatcacatgttttcaaggtaccagagaggcggtggcttgatctaagaaatttaatcttaccggtaatttgcaatttatttgcatagttgatttcaattaatattgatgtcatactataaccggacttactaaatatattaccagggtctaaaatgcataccaccatcaccaggaccggaattaagggccggctcctgcaatgaaattttttccagtatttttcatttaataaattagatttttagttttaaaaataaaaaataattttttttaatttgaccagctcaaaataaaattaatagcttcgccccttatcctcacctcgacatttgtctttgtaccagttaccaaagacatcacggcaggattcgaggctggtgaagagagaagattaaagaaaggtgtacctcaaggagggacgatgagtaaattaaatatatttattttggaatttttaaattcatgagcacacgaggcgcgacggctcttattaaatttttcgtacttaccatggagaaaaaaaaaacaaataaagtaataaatgtataagcgagacgtacctttttggttcctgcactacaactgtttttgaagcacaaaatattattttttttcctttcaacgtaaaacaccaattcctttaaaaggaaacaacttttcttcgaatataaaacaggggtttaaagcaacgcaactcgttgagattctttcaagtttgtgcagtgcagctcatgatggtagtcataacacaacagtcctggatccaactacatttataattaagttctctctttggttgaccagtgagaatcattgagaaatatcaaaacgagtttttaaaaaaatgaatatgaaaacaaatgctccgctttgacttttctttacttttccctgctttaatggataggggtatcaatttgtccagttgcagttgtggaagtaaaatacaattatgtaacattttagttgttttttaaaatgtttttaatttaaaaatatattaaaatattttttattttaaaaaaattatttttaatactaacatattacaaccagatacaaacatgaaaaatattcttaaacaattctttttaattttttaataaaatattatttgaaatacaatactgtaacattttagttgaaactctattttctctacaaggatgcatggatacttttttttttaactaattgagtgtataacagtaattataattttttaaaatattttttatttgaaaatatattaaaataatattttttattttttaataaattatctttgacatcattatattaaaacgatttaaaaaaataaaatttaataaatcagtgtttgaaatgcgtttaaatatctctttggcgcggtcagccatagctttccatgcattaaactacaggcgaggacatcagacgccagttgttatataatttttggacataaggtgacaaatcttaatttccccaccacatgcagtactattcttctttcctttcgatcttgtgctaattaactagtcacatgttttgcttaattaaattgaagtgtcaatttcattttcatgttaaattaatttgttgtcggttctatatataacaaaattatcccttctgtttgtaagtattgaattttttacaagatttatttatttaaatacaaattacttttatttgaaatcttttaattatatatattcctttgttattgaacatgaatccaacatagattcatgggaattaggtccacgagaatatattagcccctagctataaacgactgagaagatacattttactaacccccctctcctctagtggatgcgatcaggttcaagtaaaactgattacagtgatacaatttcaaatgcttctggatctttctcccctttcactcataattaatttttctaatccctcctttttcttattataaaatgtatatgtcatcaaatttgaaaatatgcatataccaaacatcattaaaaataactattttattttgtaatcattcctttgttgattttttagctcaaaacaaacaaattctaaacgtgattactacgattcaacttcaatacagatgttacttgaaattctgctagattacttaattaatagtttctagctaaattatccatatatatctcttgatttataatttctgattaataaaaacagtgatcatttgatttggagcacacaataacaaatatgctattgatgagtgaaaaaaaatagccgagagaaatataaacaaagttattaaatttggttctatttagaactccactagagattcaagtcaatcaaaaaaatgttattttaatttaataaaaataaaactaaattttaatcagttcattaattaattcattgaattactcatttgattagttgcaatctcaccaagttttttttttaaaatccgacacagcaataacaaaggatattggacagggaagggtactccgaacccgtacctggtaggatgtctagttacacccggagagaaaagaaaagaaaaggccagaaaaaattaatagatatattttttttttttggtgtaagaaaattaatagagttaagtgggcgttgagcgcctcattaatcttctcatctgcctccatcattgcccacggccccgtgcctttatatctcccatcctcccgcctccccccctcacctaatatcatcaactctctttctctcaagcaacaaccatacactcatctcttctcgtctccctctctctccccctcagtacactacattcctcaacatttcttcttcttcttcttcttggcaaaata

SEQ ID NO: 51 - DNA, 3000 bp, Populus trichocarpa
aaaaaggaaattaactaatattatatatatagtgaattcttaaaaatacgtccctcaatatgataaacattgttatatcgatcgggaaatatagttttagtgttcctagtatttttaaaaagaggtgccttcgtccaactaatcaaaatacgagagtcaaactatgagagttacatataatttggtgtcagagtagaatggcatgaagttatggctgctaaactttagctgactgtctgtttcatagcctaatttagccaacacctcaagttcctctctcctgatggcatctgctgctatctctatcctcatagcttttaacccatatcacatgttttcaaggtaccagagaggcggtggcttgatctaagaaatttaatcttaccggtaatttgcaatttatttgcatagttgatttcaattaatattgatgtcatactataaccggacttactaaatatattaccagggtctaaaatgcataccaccatcaccaggaccggaattaagggccggctcctgcaatgaaattttttccagtatttttcatttaataaattagatttttagttttaaaaataaaaaataattttttttaatttgaccagctcaaaataaaattaatagcttcgccccttatcctcacctcgacatttgtctttgtaccagttaccaaagacatcacggcaggattcgaggctggtgaagagagaagattaaagaaaggtgtacctcaaggagggacgatgagtaaattaaatatatttattttggaatttttaaattcatgagcacacgaggcgcgacggctcttattaaatttttcgtacttaccatggagaaaaaaaaaacaaataaagtaataaatgtataagcgagacgtacctttttggttcctgcactacaactgtttttgaagcacaaaatattattttttttcctttcaacgtaaaacaccaattcctttaaaaggaaacaacttttcttcgaatataaaacaggggtttaaagcaacgcaactcgttgagattctttcaagtttgtgcagtgcagctcatgatggtagtcataacacaacagtcctggatccaactacatttataattaagttctctctttggttgaccagtgagaatcattgagaaatatcaaaacgagtttttaaaaaaatgaatatgaaaacaaatgctccgctttgacttttctttacttttccctgctttaatggataggggtatcaatttgtccagttgcagttgtggaagtaaaatacaattatgtaacattttagttgttttttaaaatgtttttaatttaaaaatatattaaaatattttttattttaaaaaaattatttttaatactaacatattacaaccagatacaaacatgaaaaatattcttaaacaattctttttaattttttaataaaatattatttgaaatacaatactgtaacattttagttgaaactctattttctctacaaggatgcatggatacttttttttttaactaattgagtgtataacagtaattataattttttaaaatattttttatttgaaaatatattaaaataatattttttattttttaataaattatctttgacatcattatattaaaacgatttaaaaaaataaaatttaataaatcagtgtttgaaatgcgtttaaatatctctttggcgcggtcagccatagctttccatgcattaaactacaggcgaggacatcagacgccagttgttatataatttttggacataaggtgacaaatcttaatttccccaccacatgcagtactattcttctttcctttcgatcttgtgctaattaactagtcacatgttttgcttaattaaattgaagtgtcaatttcattttcatgttaaattaatttgttgtcggttctatatataacaaaattatcccttctgtttgtaagtattgaattttttacaagatttatttatttaaatacaaattacttttatttgaaatcttttaattatatatattcctttgttattgaacatgaatccaacatagattcatgggaattaggtccacgagaatatattagcccctagctataaacgactgagaagatacattttactaacccccctctcctctagtggatgcgatcaggttcaagtaaaactgattacagtgatacaatttcaaatgcttctggatctttctcccctttcactcataattaatttttctaatccctcctttttcttattataaaatgtatatgtcatcaaatttgaaaatatgcatataccaaacatcattaaaaataactattttattttgtaatcattcctttgttgattttttagctcaaaacaaacaaattctaaacgtgattactacgattcaacttcaatacagatgttacttgaaattctgctagattacttaattaatagtttctagctaaattatccatatatatctcttgatttataatttctgattaataaaaacagtgatcatttgatttggagcacacaataacaaatatgctattgatgagtgaaaaaaaatagccgagagaaatataaacaaagttattaaatttggttctatttagaactccactagagattcaagtcaatcaaaaaaatgttattttaatttaataaaaataaaactaaattttaatcagttcattaattaattcattgaattactcatttgattagttgcaatctcaccaagttttttttttaaaatccgacacagcaataacaaaggatattggacagggaagggtactccgaacccgtacctggtaggatgtctagttacacccggagagaaaagaaaagaaaaggccagaaaaaattaatagatatattttttttttttggtgtaagaaaattaatagagttaagtgggcgttgagcgcctcattaatcttctcatctgcctccatcattgcccacggccccgtgcctttatatctcccatcctcccgcct

SEQ ID NO: 52 - DNA, 2556 bp, Vitus vinifera
tttttaaaataattatttcaaaaaatatcaacagtgcaattattttttataataaaatttaacatatcatataaaaagctttctttttttaataaaaaattattaattagaaaattattttctgttttgaaattaaaaaaaataaaaaataaaaaaattccagaagagttttgaaacaggaccacatgttaaaggtaggtgcttaaattaaaaattgaatatgatatcgacggtggcagcaggtggagtctgagtgtgagtggggatggccgttggccacataaaattctcagagagttaggtttggttcccatgaaatgaaagtggcctttccatttaacattctacaaggtgtctccatttgcctttgccaccattaaatttagggtttctgggttcatcttctgtccatttcagatgaatgcactctcctctctcccccgtatatcccctctgcacttccatcttaaatgccatattttgtggttcaaaacttgacccccattcatactccaccttcatgtcttgatgctttcttatttttgcactccaaaagaagggaaaaaagagagaagtatgaaacaaaaacgaggcataacatgatcacttcattatataattacccatcaaatatatatttactaaaattacaaatgtcaataacaaaatattagatcgataactgttttcaaaaacagtttttgaaaatagtctttaaaaattattatttcatgtttttataaaataaaattttatttaaaaacttaaaatgtttttaacttgtttttagtatctttaaatatattttaaaaataatttttatatgcctttgtcatttcattttgatgttaatttttatatttgaaaattgttttaattattaattttaatttaatgaaagctcagcccaatctaaaccagcaagatggttgatgatagataataattaataatatataccccaaatcagaataaatctgctagccgttaccctcaaatatttgaagtatccctatacattttggtgatgcaacttgttgtgttgattaggtttttagtatacatggtttaagagaaacaatccttaattagtttatactaaatgatgttatagacactaagtccaccttatgttagaagtactagttttagattagcttaactcaaatgttttatttcaaaagattagagtatgattaagaatgttttttgaaaaactattttataaaatagtttttttaaatagaattttatttgagaatttgaaatatactccgacttgtttttatgtatttttaaatattttttaaaattaatttttatttattatgctttatttttcatcattttttgtatttgtattgttaaaacaatttctagaacaagtaaaaataattaaaatatgtcatttaaaatcattatattttcacaataagttttccaaatattatttttattaaaaaataaaaataataattttttgctcgtaagtacatttgtttttgtgttttttttttcttcaaagaactctttatcatagtatcatgtaagaggtatcattacgttttttttccaagcactcaatgctaacaataccaaaatgtttactaaaaatgtaattttatttgttttttgttttaaaaaatagaaaattattttaaaaagtaattacaaaaaacctatttgacaactatttttaaaaacaattctgaaacttatttttgtataacaaaactctataatatttttaatattcttatatatgttttaaaaataatttttatatctagtatttaaaacaattctaaaaataataataaaaaaaaattaaaattttttttattttttgcttttaataataaaaaacaaaaaataatttttaatggtttagtttgtttttattatgaataatagaaaattattttaaaaaccaattctcagtacaaaatggcccggaatgttcggattgcgttgtacaaaacccatgatacaatcactttctagtttgtagaggtgggatgaggctattaattgcttgggagtgtcattgaaaggatggatcttggcttatgaaatttcaccactttggaagaaaaacaatgaactgatgaattaatttaagtcccaaatcaattaattaaggatgaatattttgaatttacaaggaagggtgctatttttttattagaccaaagtagaaaaatgaacaaataacagtaacccattaaagaggggcatcatgaatatgaaaatgaaaatgaaagagaaaaagagaaacaaggggggagtttagttgattaataatgagggaggttaggaaataaagtgtaggtgagtccaggtgggggagcgttgcgtgagtgtgagctgttcattaaatcctctcatctgccctctatttaattcccactattttagctttgcctttaaatcccacctcaccctcccattttctccctaccactctcttttctctcttctttcatcaacatcatcagctctttctctttctctctttctgtctttctccctcaattcttaattctcactcccaaa

SEQ ID NO: 53 - DNA, 2500 bp, Vitus vinifera
tttttaaaataattatttcaaaaaatatcaacagtgcaattattttttataataaaatttaacatatcatataaaaagctttctttttttaataaaaaattattaattagaaaattattttctgttttgaaattaaaaaaaataaaaaataaaaaaattccagaagagttttgaaacaggaccacatgttaaaggtaggtgcttaaattaaaaattgaatatgatatcgacggtggcagcaggtggagtctgagtgtgagtggggatggccgttggccacataaaattctcagagagttaggtttggttcccatgaaatgaaagtggcctttccatttaacattctacaaggtgtctccatttgcctttgccaccattaaatttagggtttctgggttcatcttctgtccatttcagatgaatgcactctcctctctcccccgtatatcccctctgcacttccatcttaaatgccatattttgtggttcaaaacttgacccccattcatactccaccttcatgtcttgatgctttcttatttttgcactccaaaagaagggaaaaaagagagaagtatgaaacaaaaacgaggcataacatgatcacttcattatataattacccatcaaatatatatttactaaaattacaaatgtcaataacaaaatattagatcgataactgttttcaaaaacagtttttgaaaatagtctttaaaaattattatttcatgtttttataaaataaaattttatttaaaaacttaaaatgtttttaacttgtttttagtatctttaaatatattttaaaaataatttttatatgcctttgtcatttcattttgatgttaatttttatatttgaaaattgttttaattattaattttaatttaatgaaagctcagcccaatctaaaccagcaagatggttgatgatagataataattaataatatataccccaaatcagaataaatctgctagccgttaccctcaaatatttgaagtatccctatacattttggtgatgcaacttgttgtgttgattaggtttttagtatacatggtttaagagaaacaatccttaattagtttatactaaatgatgttatagacactaagtccaccttatgttagaagtactagttttagattagcttaactcaaatgttttatttcaaaagattagagtatgattaagaatgttttttgaaaaactattttataaaatagtttttttaaatagaattttatttgagaatttgaaatatactccgacttgtttttatgtatttttaaatattttttaaaattaatttttatttattatgctttatttttcatcattttttgtatttgtattgttaaaacaatttctagaacaagtaaaaataattaaaatatgtcatttaaaatcattatattttcacaataagttttccaaatattatttttattaaaaaataaaaataataattttttgctcgtaagtacatttgtttttgtgttttttttttcttcaaagaactctttatcatagtatcatgtaagaggtatcattacgttttttttccaagcactcaatgctaacaataccaaaatgtttactaaaaatgtaattttatttgttttttgttttaaaaaatagaaaattattttaaaaagtaattacaaaaaacctatttgacaactatttttaaaaacaattctgaaacttatttttgtataacaaaactctataatatttttaatattcttatatatgttttaaaaataatttttatatctagtatttaaaacaattctaaaaataataataaaaaaaaattaaaattttttttattttttgcttttaataataaaaaacaaaaaataatttttaatggtttagtttgtttttattatgaataatagaaaattattttaaaaaccaattctcagtacaaaatggcccggaatgttcggattgcgttgtacaaaacccatgatacaatcactttctagtttgtagaggtgggatgaggctattaattgcttgggagtgtcattgaaaggatggatcttggcttatgaaatttcaccactttggaagaaaaacaatgaactgatgaattaatttaagtcccaaatcaattaattaaggatgaatattttgaatttacaaggaagggtgctatttttttattagaccaaagtagaaaaatgaacaaataacagtaacccattaaagaggggcatcatgaatatgaaaatgaaaatgaaagagaaaaagagaaacaaggggggagtttagttgattaataatgagggaggttaggaaataaagtgtaggtgagtccaggtgggggagcgttgcgtgagtgtgagctgttcattaaatcctctcatctgccctctatttaattcccactattttagctttgcctttaaatcccacctcaccctcccattttctccctaccactctcttttctctcttctttcatcaacatcatcagct

SEQ ID NO: 54 - DNA, 3000 bp, Sorghum bicolor
tatccccttgatgacgacgagcgttgagcgtgcgtggcagtgattgtctgattgactgatcgagcaagtgtgtatagtagccaactctctctgcatgtggtggcttgcaggacgcacacaactattatagaggccggccgcgcatatatataggtatataggatcagtcaatcagacaatcactaaagatacattgacatgtttgtgtttttcctagaaaatcatttcaaaattttcaaaggaaagccttttaagacaaactagaagttatttattttgatctatatgtatttttactcctacataagaggctacctttatcttccacataaaattttagaagataactttgacatcatggacaagttcgaatagacccatgacggctaatgtgtgatgtgagtctcaccttgggtcttgagagttggttagaccaacatactcccttcatcctaatctataagtcactctaagaatcttgtcaaaacatctcaagtaactaacattatagaaaaaatcaaaaagatttatgacatcaaataaatattactataaaaatataactaatgaagaatctaatgatacttagatgatatcataaatgttattatgttatcatataaatttggtcaaacttaagatacttttgactttctaagattcttggaatgacttataatttaggatggaaggagtatacggcttctagagtccttatcatcaacaccatgctagaccttttacgtgaggggaggatgaaagcataagtgggttgataggactgtggttcgcttagtgtatggtgtgaacccgatagactctagaaacttgtgtatcaatggtcaattatgagtagaaggttccatcggaacaattattatttatttcaagctatttcggctctttcttaatcttcaaaaagaaattaattccgtaatggtaagacgaaaaaagaaaaaaaaataaaaaggaagtgtggaaaaatgacaaaatggcggcacagggaggcgagaaccaccgcttttaggaaataagcctacaatttgattctcgtctcgttttacttgcattttctttcgttcagtctcgttctgagagtggaatcgaaccactcactccgtttggatttagagtccaaagggcccagccagcgaaagaggattgacctccgtggacatgtggtgcatggtacgtgttggcccaatcaatgtagcttgtgacatggcactgcgccattactagatgcatgcacgtgtgtttcaagagggaacattttttgtgaaatgtggttgtattcacatcaatccatgtgtattagggtggattgaagtggaagttgaactaaattttacctcaatccaccgcaacccatgtggattgaggcgaatccaacaacattcaaataaggccttacttggttatgggtgtgttggggagacgttgacatgaggccctttgagatggttgcaacctgggtcaatttaacttaggccatggtggatcatgtgtatgttgaggtgagatcgtgcaggtttggtctcaccttgatcactgagggtggatatagcacatataatgtttttaatctacatcattaactctaggttggcccttttatgtaaagcaaggatgaaagcataaataggttagtgaaagtgtgcgcttaactaagagtgtagagtggatctgagatattgaactctaagcactaaataaccaagttttaacttatgtcaatgttaatttgttagtataaacaataagaatataataagcatataaatattgtaatacaacttaccaccaataactttagtactctactgcaaagtataaagacgttttggcttttctagatatatagtttggttgtgcacttacatatattttatgtctagatatatacatattagaatgtatctagaaaagacaaactatcttacaatttagagtgaagagagtatatatagagatgtaatgatcatcttgcatcattgaaatactatatgacatcaaattattacaaaaacaaaaatatcattggttgaagcttgttgaagatcataaattattatttttgagccctcataaggtacaactgccgtttctaaacatatgcacaaacacaaacactcacgcacgcatacaacacacacccagtgtgcacgacctacaaactatacacacgtagatacgaaccatgttacggtcgacgcggacatgaactgggccttcatgaggggcagcactagatatcactgagtgatctcactgagtccaccccttccccctcctcctgatggcatccttggaccggaaaccatgtcagggctctccgatctttgcttcaaccatggcgtcaagtttgaagcactcgtctcacagcgttttggatgcccagtgagtcccatctctccccagactgttttggatctttgcttcaaccatggcgtcaagttttggatctctccccagcattttggatgcccggtccgctgtccgtctgaatattgattcagtgagtctcatccttcaagcttgctttggtggcaaagaatacaatgttacccatctctctggatggatgttcaaattttcaatatcttgcaaaaatgtggctttcatgattaacaaccttaaaagccactctttcaaaacttttctcatcttctttcacctttggagtggaggaggaccaaattggcgcaaggattttactctctggcaacaggagcaagatgcaaaatggaaccttgttggatccaagtccaagaaatcttatgctgatattgctaaatcaaatatcaaaaaatcagttttgttgcgcttatcttaccccaccaattatgcatccaacttcctggagccccctcgcagagcatctttggctcctgacaggttctcccatcgccctgctcaaaataatgtgatgaaagcacaaattgatagtaaacctgtcaaaggtttgcaacaatctcatcctagtggctttccaagatg

SEQ ID NO: 55 - DNA, 3070 bp, Zea mays
cgggcggagcggagttcgccgtcttccggggcctagcccaagtccgagccctgggtcgggcggaacggagttcgccgtcttccggggcttagcccgagtccgagccctgggtcgggcggagcggagttcgccgtcttccggggcttagcccgagtccgagccctgggtcgggcggaacgaagttcgccgtcttccggggcttagcccgagtccgagccctgagtcgggcggagcggagtttcctatggcgcctttggcaaggcctgactgcctgtcagactcactctgtcgagtggcactgcagtcggagtggcgcaggcggcgctgtccttctgtcagaccggtcagtggagcagcgaagtgacggcggtcacttcggctctgccggggggcgcgcgtcaggataaaggtgtcaggccacctttgcgttaaatgctcctgcgactcggtcggtcggtgcggcgatttagtcatggttgcttctcagcgaaggcaaggcctcgggcgagccggagatatgtccgccgttaaaggggggtctcgggcgagacggaaatctctcggggtcggctgcccttgtccgaggctaggctcgggcgaggcgtgatcaagtcgctcgtatggactgatccctgacttaatcgcacccatcaggcctctgcagctttatgctgatgggggttaccagctgagaattaggcgtcttgagggtacccctaattatggtccccgacaataagtatcactgagattattaaattatatttttggattgagggagtagtatttaaagaagagccttgcatgcaatttcttttgtttgaataatgttttcaacttaaatacttttttttgcatgtgtaacatttattctccataatatttttccatgtatctaacttataaatcattttcataaaccaatgtcaaagatgaatccatgtttcttacttggaaaccccgaacaaacaccactagcacgaggcgctcgcgttagcgtcgctcaccgacgacgagaagaaacttggcgactgtcagttcgaactctggaagcagtcctacatggcccatgcgccgctgtgtacggcaagctccggcgcagctgccgcttggacgtggtccagagcggctgcaccgcgctgtccatcgtcaaacatggggacctcatggtcgtcgccaatgtcgacgactctcgggttgttctgggcatcgcaacctacgacgacgccatcacgccgtctagctcatcatccacctgaagcctaacctgccacgtaagtcgctactgaccgaccatgaattcttgtgcgctggaatgatgaccattgttgttgttgtgtgagtgtcctcgaacaagatgtatgtagaggagtagcacatccggtggtgcaacgaccaggtgtactacctcgctgatgagcccggggtgcacttcatttggcagcccagccaagagtgatcggtactcaccatatcgcgcgcgttcgacgactattatatcaaggattgtggcgtcatctcgacaccggaggtgagcagaggtggaccgacaacaatgaccactcgccatcgtcggggtaccttttgtgtcggcctgcctttaattctcttcgcaaacacacacttgtattttttgtttaagcaagcgtgtatggtggtgcgtgcctgatgactaacgatgtacgacggaacttctaccggcaggtgtggcacgtgctctccaataatgagaccatgcaaatcatgacatatatcgaagtgtgcatgatactgatagttgcaatgtagtagtgaaacaactaaattaaaataacaaaatttatgtatggctaggatcacaaatgaattatgaaatattttcttataacaatataagacacattttgtatataagttatcatggtattatatgttcccgttgcaacgcacgggtactgacctattgttcattaaggatctttaatagatgttttttgttattttctcgaacctaaatgttcgtcgaccaaacttgttttgtatcagtgtataatattattgtcactgttttttatgtcgcggactatgttttttgtacgtcattgaaactacctataaaattgtcactgtgtatcagcgtatgtgtatgcagttggcttgatgtgagacaataagctgaacccacggggttttcatggttttccacccaattacgagttggtttgcggtcaataatattattggatgggttgggtttattttttttcttatattttagggtgggtgtgggataaatatcaaagttattatacttgggtatgaatgggagtgagttggattttttgccattagcaggcctacatggcggcaaacacacccccatgtctttatccccatttcatacaagtcaggtaattaacgagtatccgctgacatgagactgttttgagttttgacgctttcataccggcctgatgatgataccttggcagttggcaaacggcccatcgatgtccgccattaactgccgatccaatccaagtaaccgtaggtatctttctgaccatagtccacaagtccaaaccagccgtcaaaccaaccgatcatggacatccgatgggcatgcttgttgcgcgatcaaaagtcatcatacaaaaaatgtgatgaataaaaactggacaaaatttgtgccatcgaatggagcatacagtcgtggggggcctgctacaagaccaggcgccaaccccctgcctctgggctctggttggtggcggtagccgggctctcatttaaactacccatctgcccccgattcttttaattacgggcgaccctcgcggctccgcccctattttaagaccccaccacggcaccacctcctccgcaaacaacacacgaacaccgcaccgcaacgtagccggctaggggaagagctctttccttcagctgtgccgtgcacaacgcacggcacgctggtttggtttgcatcgcccccgccaagacgctgccgtgagcaggcagagcgggtgggaagactggtgggcgagccggccgcgccgagggatagcagcagcagcagcaggcgggcgac

SEQ ID NO: 56 - DNA, 2719 bp, Setaria italica
aaagcaaagattcatgcctgagctgttggtgacgctatcagctttggctcacctaaaagcagcgccggccacagctggggttcgtttcgtctactctgattctcttctgaagtctgaagtccaaaccatggccaaagtgactgttgacgcaggcacgtaaatattcaattgtcacagtgcggtttggacaccacgtagacaaacgtttcctggtcctgagcttttgattggcccatttcagactagtacgttaatgcttgcactggcccgaagcggaccacattgctactgtgtgtttatctgctccgagaaattgggagatagggtggttagtacagatgagcagctgttcgctttctccatctatcattcttcagcacctgcacttccaaaaagctttgaatttggcttaggtcatggaacggcttttgtcaggatctcaacgttctcctttatttgcgagctcaactccttcctcatagctaactcttcgttcagtcctccagcattgccctctgaagtctgaaccactccatttctatattgtacaaggaaaaggagtgctatatcagggttgcatttccaaatctgcaaagcacgcgtacttgaagccatcaaaagatgactggccagcaggagcagcttgccagtgacacagatttcgtccaaacggagcacgcagcgcatcgtgctacagcgaatcgatcggatcgagctgaggccaagcattcaaggttttgcaggtgcattgtgatgccgacccgacacacgcgactgctgcagtggctccatctataaatctgtcctatataccagcacgcgtgaacagacaaaaaaaaacatcaacaacaagaagagaagttttactgctgcttccagaaaccagcctgatcatgagtttttggctttgagaacgagctgaggatggttttccagggcaggtgaacgacatctcgccatttctcaatcctctaacctctccagatgaggggaaacagttcagtgctttgcctgtgcattgtgcgagaatcgggcgggagcgttcatcttgatccagcacagcagggctttaattgtgcaagcagaaggtaccagtaccagcagaggattgatttgcacatgtggaagctctgaagccgttgctatcgcatcgttctgacccggtttggtggcacgagcaaggtagccaaatcaggccagccattgcatgtgttgccgtacatgcacaagaaagtttaaccgcagtcatatgaagtactactgacccggatgtactacatgactgcagactgtgatgcttgctagaggtaaaaggacacggagggcaggagtcctgccagttccctcaatgctctgtgctccgatctctctagaagggacccccttctttttatttttgaaactatagaaagacaaatttcccttccccttattagattgtactaagtactattttgattacttgtttttatgaattgtgcagaggctgagaggcctgatccaactttgggtgcggccacaatgtgtgggaaatatgcgctgtgttcatctgcacctctctgccccctttatctcaagcaaacgtctgtaccttgattatgtacttggtatgattggtgtgagattcagatgcaacgattacttcatatgagccttgctcatcaccgattttccctcccttctctcgtgcctttttccttttcccaaaccactgaagctcaaccagtccgcatcagttcactactcccgctagcatggcaacggcatgatcatgaaggattccaacaaatggcctggcagctgatggaattcgactgctctctctgaaatttagctactccttttttcatcaattgagttttgacgataacaatttggagtggcgcaattcacaaccacaaccaacacttgtctccctctccctggacggaacagtgcggccttgctaatgctaccaacaacacggtgcgcggtcgtacccttggccgttggcaaatggccgatcgacatcgccattaactgccggtccaagctgcgccaggcaagccgcgaaagccgtagagtaccttcccgttcctgcccaccaacggcttcctccgcgcaccgggacgacaacctgatcgacccatccccaccacttgatcgtcgcacaccgatcctcgcgtgcgctacagttcgtcacgcacccgtacgttcaaccgtcgtctcctcacccctcgctaaatcctcgctgttttcccgaaattgcttaccaaaaccccgtgcgcgcgcgtgcccgaagctgcagtgctgcaggcggatgcgagcgccggagcaccggagccggaggcaggcaggcccccgcccccagtggccaacccctaactcctccggttggtggcggtagccgggctctcatttaaactacccatctgccccggatttaattacgggcgccccctttcccggctcgcccactatattaagaccccaccacggcaccacgtctcctccgcaaacaaacaccccaactcgccaggccaacgtacccccacacaaaacaccgcgacgcagcgccccggttctccctagcttcccactgcgcccaacgcacggcacgcggttgcagcagcgtccgcgagttccctgcggagagcagaggccagaggcgagcggcagggagggagagtgatcgatcgactagtgaagtgagccgcgccgcgcgagggcggggggcgcc

SEQ ID NO: 57 - DNA, 2500 bp, Setaria italica
aaagcaaagattcatgcctgagctgttggtgacgctatcagctttggctcacctaaaagcagcgccggccacagctggggttcgtttcgtctactctgattctcttctgaagtctgaagtccaaaccatggccaaagtgactgttgacgcaggcacgtaaatattcaattgtcacagtgcggtttggacaccacgtagacaaacgtttcctggtcctgagcttttgattggcccatttcagactagtacgttaatgcttgcactggcccgaagcggaccacattgctactgtgtgtttatctgctccgagaaattgggagatagggtggttagtacagatgagcagctgttcgctttctccatctatcattcttcagcacctgcacttccaaaaagctttgaatttggcttaggtcatggaacggcttttgtcaggatctcaacgttctcctttatttgcgagctcaactccttcctcatagctaactcttcgttcagtcctccagcattgccctctgaagtctgaaccactccatttctatattgtacaaggaaaaggagtgctatatcagggttgcatttccaaatctgcaaagcacgcgtacttgaagccatcaaaagatgactggccagcaggagcagcttgccagtgacacagatttcgtccaaacggagcacgcagcgcatcgtgctacagcgaatcgatcggatcgagctgaggccaagcattcaaggttttgcaggtgcattgtgatgccgacccgacacacgcgactgctgcagtggctccatctataaatctgtcctatataccagcacgcgtgaacagacaaaaaaaaacatcaacaacaagaagagaagttttactgctgcttccagaaaccagcctgatcatgagtttttggctttgagaacgagctgaggatggttttccagggcaggtgaacgacatctcgccatttctcaatcctctaacctctccagatgaggggaaacagttcagtgctttgcctgtgcattgtgcgagaatcgggcgggagcgttcatcttgatccagcacagcagggctttaattgtgcaagcagaaggtaccagtaccagcagaggattgatttgcacatgtggaagctctgaagccgttgctatcgcatcgttctgacccggtttggtggcacgagcaaggtagccaaatcaggccagccattgcatgtgttgccgtacatgcacaagaaagtttaaccgcagtcatatgaagtactactgacccggatgtactacatgactgcagactgtgatgcttgctagaggtaaaaggacacggagggcaggagtcctgccagttccctcaatgctctgtgctccgatctctctagaagggacccccttctttttatttttgaaactatagaaagacaaatttcccttccccttattagattgtactaagtactattttgattacttgtttttatgaattgtgcagaggctgagaggcctgatccaactttgggtgcggccacaatgtgtgggaaatatgcgctgtgttcatctgcacctctctgccccctttatctcaagcaaacgtctgtaccttgattatgtacttggtatgattggtgtgagattcagatgcaacgattacttcatatgagccttgctcatcaccgattttccctcccttctctcgtgcctttttccttttcccaaaccactgaagctcaaccagtccgcatcagttcactactcccgctagcatggcaacggcatgatcatgaaggattccaacaaatggcctggcagctgatggaattcgactgctctctctgaaatttagctactccttttttcatcaattgagttttgacgataacaatttggagtggcgcaattcacaaccacaaccaacacttgtctccctctccctggacggaacagtgcggccttgctaatgctaccaacaacacggtgcgcggtcgtacccttggccgttggcaaatggccgatcgacatcgccattaactgccggtccaagctgcgccaggcaagccgcgaaagccgtagagtaccttcccgttcctgcccaccaacggcttcctccgcgcaccgggacgacaacctgatcgacccatccccaccacttgatcgtcgcacaccgatcctcgcgtgcgctacagttcgtcacgcacccgtacgttcaaccgtcgtctcctcacccctcgctaaatcctcgctgttttcccgaaattgcttaccaaaaccccgtgcgcgcgcgtgcccgaagctgcagtgctgcaggcggatgcgagcgccggagcaccggagccggaggcaggcaggcccccgcccccagtggccaacccctaactcctccggttggtggcggtagccgggctctcatttaaactacccatctgccccggatttaattacgggcgccccctttcccggctcgcccactatattaagaccccaccacggcaccacgtctcctccgcaaaca

SEQ ID NO: 58 - DNA, 2754 bp, Oryza sativa
ggcaggatgtactcacgtacagttagagcattaacttaggcaagcgtttttctttgcaggtaatggcctctgtcaaacctaatacagattggcagtttggcgcgatggacaggtcatgatcaattttaaataagcagatgatcacatttaatgtgtagtatgaagggaacaggtagaataatacttgtaagtttacaatcctgtcccacgaagatgtcgatcccctaagtgccgttcgtcgtagtacatgagggacaggtccaaaacgaagagacggaattcgctcgtgcgaaacaagggcaagagagacgtgaaccgaacaggattgcccttgcacacctgcggcggatgtatggttgcagctaagctttattaatgtgagtctctgcccttcctctggtcgatcgatgacgagcaaacacagcgcgtttcgccacgctttctcccaacccccaactccatcccatgtcggcccatcgtccattcgtcctccagaccgatcacatattcagacccgtcaacttcagcatttcacgcggccactacgacagctgcttcggctgcactttcactcgtatcagcgcgaggggaagaagaacaatccgtggttttccgtttcttcagaggcatggacagatcgtctcacgactcgtacgcgaagatgcttgatgcttcccggaggatcctgtctcgaattttgattggatcactgcgcactggacactcactactacgttaatgctgctgccagggctgcagccaaaggaccacactgtcattggctccgggacaataggaggccatatatttagccattttttagggagattttcaccaattgtacagttgcactattgctacgcagatcactgcatacgcaattaactctttcttacaagctcagaagctgtctgcacctatatagctactccctcctccgttctataaaaaaccaacctactatcggatgtgacacatcctaatactatgaatctggatatacatcatactaaaatatgttatatccggttctagattcgtttttatggaacggagggagtattctgtcatcagctatcactgctctgcctgaacttgtctgagctattactactgtagtatatgaatttatgaagtggagtctcgtaacaaaaatacgagtatactccgtactgtactacccttatcaggattcaaggatactaggagtatagcattaccagatcaggcacttagatgtggccatccaaagagtaatggtaatagcctaataggagtaccatctactattgatctttcaaaaaaaaaagtactagtatagaagtagtatccagctagagctgcttaacagggtcagaatttgtccaaacagagcttgtaatgcacactgacgaagtcgatccgatcgaatcagagtcaacatttaaagagtactatttcgaagtaaaactgttcagttcttacaagattacatgtgaatttgcaagacttggacatgagtgttcatctcgtagtttaatgatgggtacccaacctgcaacaacagtgctttaaattgtacaagcagagggtaccaacagagtaatttgcacatgcagtcctgaacctgatgccattgcgaaacacacaaccctatacggtgcagatgcaagggagcccaattcagtcccagccattatctgtattgccgtacttccgcagggaaagttaccctctcatctgatctaccattgcatacatctcaaaaggaagtgagtaaaaaagaaaacaggaccaatcttcagagataagtttttgaaacctatcttcagagataagttcactcggcgataggagaggacctgatttggactcaaatcaggtgttgacgaatagagtagcaagagttttttcgacgggtcaagacctcaagggtcttaacagttgaactaactcggttatgatttggacacttggtgattaactactgataatagtactacttattgttattggcttgttacatcattcggtgctcaaaaatcagatgcaaatttagatgggacagacagcagctactagcaacataagagaattatgttcagtgtatcatgcatgactaaactctgaacgtactcacctggatccagatgcgagcagtacagtacctgtgcacattgcttgtgtattactccacttaattacgaactctattattttcctccgataatgcccgcagaacaaggttgtcactgaaaaatggtcctctccagagtccaggagctataggaggagtatgatactccttagcaatcatatactcatatgacatatccaaattgacaccggggttaagccgttaaccgtcactacgagttgcacttgtataaacaaaaaacaagggagaaaaccttgtgtcccccccatgatgcagaaatctaataagagcagcccaacgcttccggttggtggcggtagaccggcctctttaaactaccccatccgccccagatttatcaattactcctcgtcatctcgtctcgtctccgccaccgtgcgcgcgtcccctatattagaccccccaaccgggcaccggacacaccatcaccaacacaccactgcaaacccatccgcctccgcaccgcatcgcacctacaaattgtgcacgctgcaccgctcaaaaaaaagaagaaactaaagtcgtacgtaggacgcggcgtgcgagcgttggtgcggtgcgcggcggcgcgcggggaagtagtgagagcatcgatc

SEQ ID NO: 59 - DNA, 2500 bp, Oryza sativa
ggcaggatgtactcacgtacagttagagcattaacttaggcaagcgtttttctttgcaggtaatggcctctgtcaaacctaatacagattggcagtttggcgcgatggacaggtcatgatcaattttaaataagcagatgatcacatttaatgtgtagtatgaagggaacaggtagaataatacttgtaagtttacaatcctgtcccacgaagatgtcgatcccctaagtgccgttcgtcgtagtacatgagggacaggtccaaaacgaagagacggaattcgctcgtgcgaaacaagggcaagagagacgtgaaccgaacaggattgcccttgcacacctgcggcggatgtatggttgcagctaagctttattaatgtgagtctctgcccttcctctggtcgatcgatgacgagcaaacacagcgcgtttcgccacgctttctcccaacccccaactccatcccatgtcggcccatcgtccattcgtcctccagaccgatcacatattcagacccgtcaacttcagcatttcacgcggccactacgacagctgcttcggctgcactttcactcgtatcagcgcgaggggaagaagaacaatccgtggttttccgtttcttcagaggcatggacagatcgtctcacgactcgtacgcgaagatgcttgatgcttcccggaggatcctgtctcgaattttgattggatcactgcgcactggacactcactactacgttaatgctgctgccagggctgcagccaaaggaccacactgtcattggctccgggacaataggaggccatatatttagccattttttagggagattttcaccaattgtacagttgcactattgctacgcagatcactgcatacgcaattaactctttcttacaagctcagaagctgtctgcacctatatagctactccctcctccgttctataaaaaaccaacctactatcggatgtgacacatcctaatactatgaatctggatatacatcatactaaaatatgttatatccggttctagattcgtttttatggaacggagggagtattctgtcatcagctatcactgctctgcctgaacttgtctgagctattactactgtagtatatgaatttatgaagtggagtctcgtaacaaaaatacgagtatactccgtactgtactacccttatcaggattcaaggatactaggagtatagcattaccagatcaggcacttagatgtggccatccaaagagtaatggtaatagcctaataggagtaccatctactattgatctttcaaaaaaaaaagtactagtatagaagtagtatccagctagagctgcttaacagggtcagaatttgtccaaacagagcttgtaatgcacactgacgaagtcgatccgatcgaatcagagtcaacatttaaagagtactatttcgaagtaaaactgttcagttcttacaagattacatgtgaatttgcaagacttggacatgagtgttcatctcgtagtttaatgatgggtacccaacctgcaacaacagtgctttaaattgtacaagcagagggtaccaacagagtaatttgcacatgcagtcctgaacctgatgccattgcgaaacacacaaccctatacggtgcagatgcaagggagcccaattcagtcccagccattatctgtattgccgtacttccgcagggaaagttaccctctcatctgatctaccattgcatacatctcaaaaggaagtgagtaaaaaagaaaacaggaccaatcttcagagataagtttttgaaacctatcttcagagataagttcactcggcgataggagaggacctgatttggactcaaatcaggtgttgacgaatagagtagcaagagttttttcgacgggtcaagacctcaagggtcttaacagttgaactaactcggttatgatttggacacttggtgattaactactgataatagtactacttattgttattggcttgttacatcattcggtgctcaaaaatcagatgcaaatttagatgggacagacagcagctactagcaacataagagaattatgttcagtgtatcatgcatgactaaactctgaacgtactcacctggatccagatgcgagcagtacagtacctgtgcacattgcttgtgtattactccacttaattacgaactctattattttcctccgataatgcccgcagaacaaggttgtcactgaaaaatggtcctctccagagtccaggagctataggaggagtatgatactccttagcaatcatatactcatatgacatatccaaattgacaccggggttaagccgttaaccgtcactacgagttgcacttgtataaacaaaaaacaagggagaaaaccttgtgtcccccccatgatgcagaaatctaataagagcagcccaacgcttccggttggtggcggtagaccggcctctttaaactaccccatccgccccagatttatcaat

SEQ ID NO: 60 - DNA, 879 bp, Arabidopsis thaliana
atggagcctcctcagcaccaacatcaccaccatcaggccgatcaagagtccgggaacaacaacaacaacaagtccggttccggagggtacacttgcagacagacctccaccagatggacacctaccactgagcagatcaagatcctgaaggagttgtactacaacaatgccatccgctcccctactgctgatcagattcagaagatcaccgctcgcctgcgtcaattcggtaagatcgagggtaagaacgtcttctactggttccagaaccacaaggctcgtgagaggcagaagaagcgtttcaacgggactaacatgaccactccttcctcatcacccaattctgttatgatggccgccaacgaccactaccatcctttgcttcatcaccaccacggagttcctatgcaaagacccgcaaactccgtcaacgtgaagttgaaccaggaccatcacctctaccaccacaacaagccctacccctctttcaacaacgggaatctcaaccatgcctcctctggaaccgaatgtggagttgtcaacgcctccaacggctacatgtcttcccacgtgtacggctctatggagcaagattgctccatgaactacaacaacgttggaggcggatgggcaaacatggatcaccactactcctccgctccctacaacttcttcgatagggctaaacctctcttcggcttggagggacaccaagaagaagaggaatgcggaggtgatgcttacttggaacacagaaggactctccctctctttccaatgcacggtgaggaccacatcaacggaggatctggcgctatctggaagtatggacagtccgaggtcagaccatgcgcttccctggaattgagactgaactag

SEQ ID NO: 61 - protein, 292 aa, Arabidopsis thaliana
MEPPQHQHHHHQADQESGNNNNNKSGSGGYTCRQTSTRWTPTTEQIKILKELYYNNAIRSPTADQIQKITARLRQFGKIEGKNVFYWFQNHKARERQKKRFNGTNMTTPSSSPNSVMMAANDHYHPLLHHHHGVPMQRPANSVNVKLNQDHHLYHHNKPYPSFNNGNLNHASSGTECGVVNASNGYMSSHVYGSMEQDCSMNYNNVGGGWANMDHHYSSAPYNFFDRAKPLFGLEGHQEEEECGGDAYLEHRRTLPLFPMHGEDHINGGSGAIWKYGQSEVRPCASLELRLN

SEQ ID NO: 62 - DNA, 876 bp, Lotus japonicus
atggaacaaccacctcaacaacaacaacagaatgaggatggtggtgggagtagtggtggaaaaggggggtttctgagcaggcaaagcagtacacggtggactcccaccacagaccagataagaatattgaaggagctttactacaacaatggaataagatccccgagtgcagagcagattcagaggatctctgctcggctgagacagtacggcaagattgaaggcaagaatgtcttttactggttccagaaccacaaagctagagagaggcagaagaaaaggttcacttctgaaactcatcttcttcccaatcccatacaacaacaacaaagaaatggaactaatgctgcttggaagcaacctgaagaacaacccattattaaccacaccaagtattctagtaacaacatttcagctcctgcagggatcatcacttctgctccatcttcttctgcagagattgtttctgttggccagataggaaactttggttatggatctttgcctatggaaaagagttttagggactgctcaatatctgctggaggcaacacaggctatgctggaagtgctataaaccacaacctgggatggatgggtgtggatccatattcctcagcctacaccaatttctttgacaaaataaggccaactgaagaagaaaccatggaagaagaaggacaagagaatggttcaccagagattgaaacccttcctttattcccgatgcatggtgaggacattcatagtggctatttcaacctcaagtctaattcttctcactatgctggtggctggtaccagactgaagaagggtacttcaacaatggttctcgtgcttccttggagctcagcctcaaatatcctgattttgct

SEQ ID NO: 63 - protein, 292 aa, Lotus japonicus
MEQPPQQQQQNEDGGGSSGGKGGFLSRQSSTRWTPTTDQIRILKELYYNNGIRSPSAEQIQRISARLRQYGKIEGKNVFYWFQNHKARERQKKRFTSETHLLPNPIQQQQRNGTNAAWKQPEEQPIINHTKYSSNNISAPAGIITSAPSSSAEIVSVGQIGNFGYGSLPMEKSFRDCSISAGGNTGYAGSAINHNLGWMGVDPYSSAYTNFFDKIRPTEEETMEEEGQENGSPEIETLPLFPMHGEDIHSGYFNLKSNSSHYAGGWYQTEEGYFNNGSRASLELSLKYPDFA

SEQ ID NO: 64 - DNA, 888 bp, Glycine max
atggaacctcaacaacaacaacaacaagcacaagggagccaacaacaacaacaaaacgaggatggtggcagtggaaaaggggggtttctgagcaggcaaagtagtacacggtggactccaacaaacgaccagataagaatattgaaggaactttactacaacaatggaattagatccccgagtgcagagcagattcagaggatctctgctaggctgaggcagtacggtaagattgaaggcaagaatgtcttttattggttccagaaccacaaagctcgagaaaggcagaagaaaaggttcacttctgatcataatcataataatgtccccatgcaaagacccccaactaatccttctgctgcttggaaacctgatctagctgatcccattcacaccaccaagtattgtaacatctcttctactgcagggatctcttcggcatcatcttctgttgagatggttactgtgggacagatggggaattatgggtatggttctgtgcctatggagaaaagttttagggactgctcgatatcagctgggggtagcagtggccatgttggattaataaaccacaacttggggtgggttggtgtggacccatataattcctcaacctatgccaacttctttgacaaaataaggccaagtgatcaagaaacccttgaagaagaagcagagaacattggtgctactaagattgaaaccctccctttattccctatgcacggtgaggacatccacggctattgcaacctcaagtctaattcgtataactatgatggaaacggctggtatcatactgaagaagggttcaagaatgcttctcgtgcttccttggagctcagtctcaactcctacactcgcaggtctccagattatgcttaa

SEQ ID NO: 65 - protein, 295 aa, Glycine max
MEPQQQQQQAQGSQQQQQNEDGGSGKGGFLSRQSSTRWTPTNDQIRILKELYYNNGIRSPSAEQIQRISARLRQYGKIEGKNVFYWFQNHKARERQKKRFTSDHNHNNVPMQRPPTNPSAAWKPDLADPIHTTKYCNISSTAGISSASSSVEMVTVGQMGNYGYGSVPMEKSFRDCSISAGGSSGHVGLINHNLGWVGVDPYNSSTYANFFDKIRPSDQETLEEEAENIGATKIETLPLFPMHGEDIHGYCNLKSNSYNYDGNGWYHTEEGFKNASRASLELSLNSYTRRSPDYA

SEQ ID NO: 66 - DNA, 897 bp, Camelina sativa
atggagccaccgcagcatcagcatcatcaccatcaagccgaccaagaaagcggcaataacaacaagtccggttctggtggttacacttgtcgccaaaccagcacgaggtggacaccaacgacggagcagatcaaaatgctcaaagagctttattacaatagtggaatccggtcaccaacagcagatcagatccagaagatcactgctaggctgcgacagttcggaaagatcgagggcaagaacgtcttttactggttccagaaccacaaggctcgtgagcgtcagaagaagagattcaacggcacaaccatgaccacaccgtcttcatctcccaactcggttatgatggctaatgatcattatcatcaacatctccctctacttcaccatcatcatggcgttcccatgcagagacctgcgaactccgtcaacgttaaacttaaccaagagcatcatctctatcatcagaacaagtcatatcccagcttcaataacgggaatttaaatcatgcaagctcaggtactgaatgtggtgctgttaatgcttctaatggctactcaagtagccatatctatggatctatggaacaagactgttctatgaattacaacaacgtaggtggaggatggacggcaaacatggatcataatcatcattactcatcagcaccttacaacttcttcgatagaccaaaacctccgtttggtctagacggtcatcaggaagaagaagaatgtggtggcgatgcttatctggaacatcgacgtacgcttcctctcttccctatgcatggtgaagatcacataaatggtgccagctggaagtatggccaactggacggtcatgattgtcatggtagaggcccttgcgcttctcttgagcttcgtttgaactag

SEQ ID NO: 67 - protein, 298 aa, Camelina sativa
MEPPQHQHHHHQADQESGNNNKSGSGGYTCRQTSTRWTPTTEQIKMLKELYYNSGIRSPTADQIQKITARLRQFGKIEGKNVFYWFQNHKARERQKKRFNGTTMTTPSSSPNSVMMANDHYHQHLPLLHHHHGVPMQRPANSVNVKLNQEHHLYHQNKSYPSFNNGNLNHASSGTECGAVNASNGYSSSHIYGSMEQDCSMNYNNVGGGWTANMDHNHHYSSAPYNFFDRPKPPFGLDGHQEEEECGGDAYLEHRRTLPLFPMHGEDHINGASWKYGQLDGHDCHGRGPCASLELRLN

SEQ ID NO: 68 - DNA, 897 bp, Capsella rubella
atggagccaccacagcatcagcatcatcatcatcaagccgaccaagaaagcggcaacaacaacaacaagtccggctctggtggctacacgtgtcgccaaaccagcactaggtggacaccaacgacggagcagatcagaatcctcaaggatctttactacaacagtgcgatccggtcaccaacagccgatcagatccagaagatcaccgcgaggctgagacagtacgggaagatcgaaggcaagaacgtcttttactggttccagaaccataaggctcgtgagcgtcagaagaagagattcaacggcacaaccatgaccactccatcttcatctcccaactcggttatggtggctaatgatcactatcatcctctacttcaccatcatcatggtgttcccatgcaaaggcctgctaactccgtcaacgtcaaacttaaccaagaccatcatctctatcatcagaacaagtcatatcccaccttcaacaatgggaatttaaatcatggaagctcaggtactgaatgtggtgttgttaatgcttctaatggctacatgagtagccatgtctatggatctatggaacaagactgttcaatgaactacaacaacgtaggtactggaggatacggatcaaacatggatcatagtcatcattactcatctgcaccatacaacttctttgatagatcaaagcctctctttggtctagaaggtcatcaagaagatgaagaagaatatggtataggcgatgcttatctggaacatcgacgtacgcttcctctcttccctatgcatggtgaagatcacatgaacggtagtggtgctagctggaagtttgatggccgtgattgccatggtagaggcccttgcgcttctcttgagcttcgtctgaactag

SEQ ID NO: 69 - protein, 298 aa, Capsella rubella
MEPPQHQHHHHQADQESGNNNNKSGSGGYTCRQTSTRWTPTTEQIRILKDLYYNSAIRSPTADQIQKITARLRQYGKIEGKNVFYWFQNHKARERQKKRFNGTTMTTPSSSPNSVMVANDHYHPLLHHHHGVPMQRPANSVNVKLNQDHHLYHQNKSYPTFNNGNLNHGSSGTECGVVNASNGYMSSHVYGSMEQDCSMNYNNVGTGGYGSNMDHSHHYSSAPYNFFDRSKPLFGLEGHQEDEEEYGIGDAYLEHRRTLPLFPMHGEDHMNGSGASWKFDGRDCHGRGPCASLELRLN

SEQ ID NO: 70 - DNA, 588 bp, Arabis alpina
atggctactcatgtagccattagaagcattaacagcaccacattcagaacctgaacttgcatgatttaaattcccgttattgaagctgggatatgatttgttctgatgaagcagatggtgttcttggtcatgaagcttaacgttgagagaagcaggtctctgcatggaaacaccatgatgatgttgaagaagaggatgatgatgatggttatgatgataacgatcactggccatcataactgagttgggcgatgaagacgttggtgtggtggtcatggttgtgccattgaatctcttcttctgacgctcacgagccttatggttctgaaaccagtaaaagacgtttttgccctcgatcttaccatattgtctcagccttgcagagatcttctggatctcatcagcagttggtgaccggattccactattgtagtaaagatctttgaggattctgatttgctccgtggttggagtccatctcgtgctggtttgacgacaagtgtaaccaccagaaccggacttgttgttgttgttgccgctttcttggtcggcttgatgatgatgatgatgatgttgcggtggctccat

SEQ ID NO: 71 - protein, 304 aa, Arabis alpina
MEPPQHHHHHHQADQESGNNNNKSGSGGYTCRQTSTRWTPTTEQIRILKDLYYNSGIRSPTADEIQKISARLRQYGKIEGKNVFYWFQNHKARERQKKRFNGTTMTTTPTSSSPNSVMMASDRYHHNHHHHPLLQHHHGVSMQRPASLNVKLHDQEHHLLHQNKSYPSFNNGNLNHASSGSECGAVNASNGYMSSHVYGSMEQDYSMSNNNIGGGGWSNMDHNHHYSSPAYNFFDRPKPLFGLEGHQEEDQYGGDAYLEHRRTLPLFPMHGEDHINGGGGAIWKYRQLDGLELRLNSYAGVAPE

SEQ ID NO: 72 - DNA, 873 bp, Raphanus sativus
atggagccaccgcaacattaccatcaagccgatcaagaaagcggcaacaacaacaagtccgtctctggtggttacacgtgtcgtcaaacgagcacaagatggacaccaacaaccgatcaaatcagaatactcaaagatctttactacaacaatggagtccggtcaccaacagccgaccagatccagaagatctctgcaacgctgagacagtacggaaaaatcgagggaaaaaatgtcttttactggtttcaaaaccataaggctcgtgagcgacagaagaagagattcaacagcacaaccatggccacaccaacgtcttcatcgcccaactcggttatgatgatggctagtgatcaccatcatcatcatggtgttaccatccagagacctgctttggtcaacgttaagctcgaccaagaaaatcatatgtttcaccagaacagatcatatcccagctccaataacgggagtataaatcatgcaagttcaggcacggaatatggtgttttcggcgcttctaatggctacattagtaaccatatctatggatctatggaacaagactgttcaatgagctacaacagcgtaggtggaggatggacaaacatggatcataatcatcattactcaactccagcttacaacttctttgatagaccatcgcctctgtctggactagaaggtcatcaagaagaaggacaatatggtggcgattcttatctggaacatcgacgtacacttcctctcttccctttgcacggtgaggatcacatcaacggtggtggtggttccatcttgaagtacggacaatcagacggttgtgatcgttatggtagaggcccttgtgcttctcttaagctatgtctgaactga

SEQ ID NO: 73 - protein, 290 aa, Raphanus sativus
MEPPQHYHQADQESGNNNKSVSGGYTCRQTSTRWTPTTDQIRILKDLYYNNGVRSPTADQIQKISATLRQYGKIEGKNVFYWFQNHKARERQKKRFNSTTMATPTSSSPNSVMMMASDHHHHHGVTIQRPALVNVKLDQENHMFHQNRSYPSSNNGSINHASSGTEYGVFGASNGYISNHIYGSMEQDCSMSYNSVGGGWTNMDHNHHYSTPAYNFFDRPSPLSGLEGHQEEGQYGGDSYLEHRRTLPLFPLHGEDHINGGGGSILKYGQSDGCDRYGRGPCASLKLCLN

SEQ ID NO: 74 - DNA, 885 bp, Brassica napus
atggagccagcgcaacatcaccatcaagccgaccaagaaagcggcaacaacaacaagtccgtctctggtggttacacgtgtcgtcaaacgagtacaagatggacaccaacgaccgatcaaatcagaatactcaaagatctttactacaacaacggagtccggtcaccaacagccgaccagatccagaagatctctgcaaggctgagacagtacggaaagatcgagggaaaaaatgtcttttactggtttcaaaaccataaggctcgtgagcgacagaagaagagattcaacagcacaaccatgaccataccaacgtcttcatcgcccaactcggttatgatggctagtgatcactatcaccataaccatcatcatcatggcgttaccatccagagacctgctttggtcaacgttaagctcgaccaagaaaatcatatgtttcatcagaacagatcatatcccagcttcaataacgggaatacaaatcatgcaagttcaggcacggaatatggtgttttcagtgcttctaatggctacattagtagccatatctatgaacctatggaacaagactgttcaatgagctacaacaacgtaggtggaggatggacaaacatagatcataatcaccattactcaactccagcctacaacttcttagatagaccaatgcctctgtctggactagaaggtcatcatcaagaagaaggagaatatggtggcgatgcttatctggaacatagacgcacacttcctctcttccctttgcacggtgaggatcacatcaacggcggtggtggttccatctggaagtacagacaatcggacggttgtgatcgttatggtagaggcccttgtgcttctcttaagctgtgtctgaactga

SEQ ID NO: 75 - protein, 294 aa, Brassica napus
MEPAQHHHQADQESGNNNKSVSGGYTCRQTSTRWTPTTDQIRILKDLYYNNGVRSPTADQIQKISARLRQYGKIEGKNVFYWFQNHKARERQKKRFNSTTMTIPTSSSPNSVMMASDHYHHNHHHHGVTIQRPALVNVKLDQENHMFHQNRSYPSFNNGNTNHASSGTEYGVFSASNGYISSHIYEPMEQDCSMSYNNVGGGWTNIDHNHHYSTPAYNFLDRPMPLSGLEGHHQEEGEYGGDAYLEHRRTLPLFPLHGEDHINGGGGSIWKYRQSDGCDRYGRGPCASLKLCLN

SEQ ID NO: 76 - DNA, 885 bp, Brassica oleracea
atggagccagcgcaacatcaccatcaagccgaccaagaaagcggcaacaacaacaagtccgtctctggtggttacacgtgtcgtcaaacgagtacaagatggacaccaacgaccgatcaaatcagaatactcaaagatctttactacaacaacggagtccggtcaccaacagccgaccagatccagaagatctctgcaaggctgagacagtacggaaagatcgagggaaaaaatgtcttttactggtttcaaaaccataaggctcgtgagcgacagaagaagagattcaacagcacaaccatgaccataccaacgtcttcatcgcccaactcggttatgatggctagtgatcactatcaccataaccatcatcatcatggcgttaccatccagagacctgctttggtcaacgttaagctcgaccaagaaaatcatatgtttcatcagaacagatcatatcccagcttcaataacgggaatataaatcatgcaagttcaggcacggaatatggtgttttcagtgcttctaatggctacattagtagccatatctatggacctatggaacaagactgttcaatgagctacaacaacgtaggtggaggatggacaaatatagatcataatcaccattactcaactccagcctacaacttcttagatagaccaatgcctctgtctggactagaaggtcatcatcaagaagaaggagaatatggtggcgatgcttatctggaacatagacgcacacttcctctcttccctttgcacggtgaggatcacatcaacggcggtggtggttccatctggaagtacagacaatcggacggttgtgatcgttatggtagaggcccttgtgcttctcttaagctgtgtctgaactga

SEQ ID NO: 77 - protein, 294 aa, Brassica oleracea
MEPAQHHHQADQESGNNNKSVSGGYTCRQTSTRWTPTTDQIRILKDLYYNNGVRSPTADQIQKISARLRQYGKIEGKNVFYWFQNHKARERQKKRFNSTTMTIPTSSSPNSVMMASDHYHHNHHHHGVTIQRPALVNVKLDQENHMFHQNRSYPSFNNGNINHASSGTEYGVFSASNGYISSHIYGPMEQDCSMSYNNVGGGWTNIDHNHHYSTPAYNFLDRPMPLSGLEGHHQEEGEYGGDAYLEHRRTLPLFPLHGEDHINGGGGSIWKYRQSDGCDRYGRGPCASLKLCLN

SEQ ID NO: 78 - DNA, 882 bp, Helianthus annuus
atggaaactcaacaacaacaagcagatattcaagattttgggaacaaaaacagtaacacctatgcatgcaggcaaagcagtactaggtggacacccacaagtgatcagatcagaatactgaaagagctctactacaacaatggaatcagatcaccaactgctgatcagattcagagaatcgctgctcaactcagacagtacggcaagattgaaggcaagaacgtgttttattggtttcagaaccataaagctcgtgaacgccagaagaaacggttcactcctactgctcctccaccaccgtctcacttctccgatcatattaaccaccatcttcccaacgctgcccccatgcagattccgtctcaccaccaccactaccaccatcaagaaccaccacatgtctatgctcaccctcacaaactctacaccactcatcacattggggttggttcttcttcacaaggagtgatgggtgtagggtgtggctatggatctgttgctatggagaagagtttcaggaagtgttcaatatcaccaccgggagagagtaaggccacaggaggaattggccggaatatcggttcaagatcacggataagtgtcgattcgtgttccttcttcgacacaattaagccaaagacatatgagatgtttgagaatcatgatcaagatgaagaacaaggagagccttcaactgagatcgaaacacttccattattcccgattcacgacggcaaccatcatgatttcttcggcatgaggacggcaaatctgcaattggagcaaggcactggaggttactacactggaggaagctggtatcggtctgatgagagggcgtctcttgagctcagtctcaactcatatggttattataactaa

SEQ ID NO: 79 - protein, 293 aa, Helianthus annuus
METQQQQADIQDFGNKNSNTYACRQSSTRWTPTSDQIRILKELYYNNGIRSPTADQIQRIAAQLRQYGKIEGKNVFYWFQNHKARERQKKRFTPTAPPPPSHFSDHINHHLPNAAPMQIPSHHHHYHHQEPPHVYAHPHKLYTTHHIGVGSSSQGVMGVGCGYGSVAMEKSFRKCSISPPGESKATGGIGRNIGSRSRISVDSCSFFDTIKPKTYEMFENHDQDEEQGEPSTEIETLPLFPIHDGNHHDFFGMRTANLQLEQGTGGYYTGGSWYRSDERASLELSLNSYGYYN

SEQ ID NO: 80 - DNA, 795 bp, Populus trichocarpa
atggaacctcaccaacaacaaccaaatgaggataataacggtggcgccaaagggaactttctttgcaggcaaaccagtacaaggtggaatcccactactgaccagataagaatattgaaggaactgtactacatcaaaggtgttaggtccccaaatggagctgagattcagcagatctctgctaggcttagaaagtacggcaagattgaaggcaagaatgtattttattggtttcagaaccataaagctcgtgagaggcaaaagaaaagactcaccaatgaagtccccatgcaacaaagaactgcctggaaacctgaagattattactcttacaagtactccaacagtaataataatcctgggttttcttcggcttcttcatctgcaaataccggtgtggttactgttgggcagacagatagccatggatatggatcggtaaccatgcaggagaagaattcttgggactgttcagcaccagctggtggtagcaatggtgctggtagtggatccatgagcaatattaactatggatcaggggttgacattaactctcacagttcatcctatgctgtatttggtcaagaacaagaagcagctgcaaagattgagactcttcctctatttccaatgcttggtgaggacatcagtagctctttcaacatcaacaatatcaacccagacttttattacagtagcggctgtggctatggtgattatggcaatgacacttcttcccgtacttccctggaccttagtctctactcctacaatggccaaccacaagattattaa

SEQ ID NO: 81 - protein, 264 aa, Populus trichocarpa
MEPHQQQPNEDNNGGAKGNFLCRQTSTRWNPTTDQIRILKELYYIKGVRSPNGAEIQQISARLRKYGKIEGKNVFYWFQNHKARERQKKRLTNEVPMQQRTAWKPEDYYSYKYSNSNNNPGFSSASSSANTGVVTVGQTDSHGYGSVTMQEKNSWDCSAPAGGSNGAGSGSMSNINYGSGVDINSHSSSYAVFGQEQEAAAKIETLPLFPMLGEDISSSFNINNINPDFYYSSGCGYGDYGNDTSSRTSLDLSLYSYNGQPQDY

SEQ ID NO: 82 - DNA, 843 bp, Vitus vinifera
atggaacctcaacaacagctccagcagcagcagcaacaaaaccaacaacagccaaacgaggatagcggcagcagcaaaggcagttttctgtgcaggcaaagcagtacacgctggactcctacaactgaccagataagaatattgaaggacctttactacaacaatggagttaggtccccaagtgctgaacagattcagaggatctcagctaggctgaggcagtacggcaagatcgaaggcaagaacgtcttttattggtttcagaaccataaagctcgtgaaaggcagaagaagcgattcactactgatatgcccatgcaaagatcccttggaaatgccggttggagacctgatgatcccattcacaacaaatttcataccattcccactcctgggatatcttccccatcttcttcttcttcacccagtgtgcttgctgttgggcagatgggaagctttggatatggatctgtggagaggagttttacagactgttcaatatcagcaggtggtggtcgtggtggggttggtggatctataaaccagagcttcgaatgggttggcatggacccatattcttcatcttatgcactctttgacaagagaaaaacaatgggtgaaagcttcgaagaagagcaagaagaagaagcaactccggagattgaaacgctcccactctttcccatgcacgctgaggatatcactggcttttgcaacattaagcccgaatccgacgcctactactccggctggtacaggcccgccgacgccaagaccagttcccgcacttctcttgagcttagcctcaactcctacgccggcaggtccccggattccccctga

SEQ ID NO: 83 - protein, 280 aa, Vitus vinifera
MEPQQQLQQQQQQNQQQPNEDSGSSKGSFLCRQSSTRWTPTTDQIRILKDLYYNNGVRSPSAEQIQRISARLRQYGKIEGKNVFYWFQNHKARERQKKRFTTDMPMQRSLGNAGWRPDDPIHNKFHTIPTPGISSPSSSSSPSVLAVGQMGSFGYGSVERSFTDCSISAGGGRGGVGGSINQSFEWVGMDPYSSSYALFDKRKTMGESFEEEQEEEATPEIETLPLFPMHAEDITGFCNIKPESDAYYSGWYRPADAKTSSRTSLELSLNSYAGRSPDSP

SEQ ID NO: 84 - DNA, 879 bp, Arabidopsis thaliana; identical to SEQ ID NO: 60

SEQ ID NO: 85 - protein, 292 aa, Arabidopsis thaliana; identical to SEQ ID NO: 61

SEQ ID NO: 86 - DNA, 879 bp, Lotus japonicus
atggaacaacctccccaacagcagcaacaaaacgaagacggaggcggatcaagtgggggaaaaggagggttcctcagtaggcagtccagtactaggtggacacccaccacagaccagattcgcatcctcaaggagctctactacaacaacggaatacgctcaccctccgcagaacagatccagaggatctccgcaagactcagacagtacggcaagatcgagggcaagaacgtcttctactggttccaaaaccacaaagcccgcgaaaggcagaagaagcgcttcaccagtgagacacacttgctgcccaacccaattcagcagcaacagcgcaacggaacaaacgcagcttggaagcagccagaggagcaacccatcatcaaccacaccaagtactcctccaacaacatatccgcacccgcagggattatcacaagtgccccatcttcttccgcagaaatagtctccgtggggcagatcggaaacttcggatacggatctctgccaatggagaagtccttcagggactgcagtatctcagccggaggtaacacaggatacgccgggtctgctattaaccacaacctcggatggatgggagtcgacccatactcctctgcttacaccaacttcttcgacaaaatacgcccaacagaggaggagactatggaggaagaaggacaggagaacggctcaccagaaatcgagaccctgcctttgttcccaatgcacggagaggacatccactccggctacttcaacctcaagagtaactcatcccactacgctggcggatggtaccaaactgaggaaggctacttcaacaacggatcacgcgccagtctggagctgtccctgaagtaccctgacttcgcttag

SEQ ID NO: 87 - protein, 292 aa, Lotus japonicus; identical to SEQ ID NO: 63

SEQ ID NO: 88 - DNA, 909 bp, Medicago truncatula
atggaacaacctcagcagcagcagcaaccacagacccaacagcactctccaaacaacggaatcatggggtccagacagagttccaccagatggaccccaacaaccgaccagatccgcattctcaaagacctctactacaacaacggaataaggtctccaagtgccgagcaaatccagaggatctccgcaaggctcagacagtacgggaagatcgagggcaagaacgtcttctactggttccaaaaccacaaagccagagagcgccagaaaaagcgcttcacctccgacgtcaacgtcgtccctatcatccagcgcgcccccaacaacaatactatcataagtgccgccaactggaagcctgaccaccacgaacaacagcagaacattaatgtccacacaaaccactccacatacaacatctcctccgctggcctcagttctgcttcctgctcctcagcagaaatggtcactgtggggcaaataggcaactacggctacgggtctgtcccaatggagaagtctttccgcgaatgcaccatctcagctggatgctcatcatcccaggttggctcaaccataaacccccacatcggctggatcggacaccacgtcgacccatattcaagtgcctacgctaacctcttcgagaaaatacgccccaacgaggagatcatggaagagtacgaccagggacaggaaaacggttccccagagatcgagacactcccactcttccctatgcacggagaagacatccacggagggtattgcaacctcaaatcaaattcctccaactacggaggatggtaccaggcagaagacgcagggttcatgtacggaagtcgtaccacttctctcgagctcagtctgaactcctacggatgcaggtcccccgactacgccaattaa

SEQ ID NO: 89 - protein, 302 aa, Medicago truncatula
MEQPQQQQQPQTQQHSPNNGIMGSRQSSTRWTPTTDQIRILKDLYYNNGIRSPSAEQIQRISARLRQYGKIEGKNVFYWFQNHKARERQKKRFTSDVNVVPIIQRAPNNNTIISAANWKPDHHEQQQNINVHTNHSTYNISSAGLSSASCSSAEMVTVGQIGNYGYGSVPMEKSFRECTISAGCSSSQVGSTINPHIGWIGHHVDPYSSAYANLFEKIRPNEEIMEEYDQGQENGSPEIETLPLFPMHGEDIHGGYCNLKSNSSNYGGWYQAEDAGFMYGSRTTSLELSLNSYGCRSPDYAN

SEQ ID NO: 90 - DNA, 924 bp, Petunia x hybrida
atggaaacagcacagcaccagcagaacaaccaacagcactacctccaccaacacctctccatcggacaaggaacaaacatcgaggacggcagtaacaagaacaactcctccaacttcatgtgcaggcaaaatagtacccgctggacaccaaccactgaccagatcaggatattaaaggacctctactacaacaacggagtcagatcacctaccgctgaacagatccagagaatctccgccaagctcaggcagtacggcaagatcgagggcaagaacgtcttctactggttccagaaccataaagcccgcgagagacaaaagaagcgcctcatcgccgcagccaccaccgataacactaacctcccaatgcagatgcagttccagagaggagtctggagatcctctgcagacgaccccatccaccacaagtatactaatccaggagtgcactgcccttcagcttcttcccacggagttctcgcagtcggacagaacggcaatcacggatacggagccttggcaatggaaaaatccttccgcgactgctccatcagtccaggcagttccatgtcacaccaccaccaccaaaacttcgcttgggcaggagtcgatccttattcctcaaccacaacctaccctttcctcgagaagaccaagcacttcgagaatgaaaccctcgaagctgatgaagagcagcaagaggaggaccaggagaactactactaccaaaggaccacctctgccatcgaaaccctgcctctcttccctatgcacgaggagaacatctcctccttctgcaacctcaagcaccaggagtcatccggaggattctacaccgagtggtacagagcagacgacaacctcgcagcagccagagcttccctcgagctctccttgaactccttcatcggcaactcctcctag

SEQ ID NO: 91 - protein, 307 aa, Petunia x hybrida
METAQHQQNNQQHYLHQHLSIGQGTNIEDGSNKNNSSNFMCRQNSTRWTPTTDQIRILKDLYYNNGVRSPTAEQIQRISAKLRQYGKIEGKNVFYWFQNHKARERQKKRLIAAATTDNTNLPMQMQFQRGVWRSSADDPIHHKYTNPGVHCPSASSHGVLAVGQNGNHGYGALAMEKSFRDCSISPGSSMSHHHHQNFAWAGVDPYSSTTTYPFLEKTKHFENETLEADEEQQEEDQENYYYQRTTSAIETLPLFPMHEENISSFCNLKHQESSGGFYTEWYRADDNLAAARASLELSLNSFIGNSS

SEQ ID NO: 92 - DNA, 864 bp, Phaseolus vulgaris
atggaaccacagcagccccagggcagtcaaccaaacgaggacggtggaagtgggaaaggcggatttctctccagacagtcctccactaggtggactccaaccactgaccagatcagaatactcaaagacctctactacaacaacggaatcagatccccttccgcagaacagatccaaaggatctccgctaggctcagacagtacgggaagatcgagggcaagaacgtcttctactggttccaaaaccacaaggccagggagagacagaagaagaggttcacctccgacaacgtccccatgcaaagacctgcaccaacaaatgctgcacctccttggaaacccgaccaagaccccattcacaccaagtactccaacatctcctccacaggaatctccagtgcatcctcctcctcagtcgagatgatcaccgtcggacaaatggggaactacgggtacggaagtgtgccaatggaaaagtccttcagagactgctccatatccgccggaggatcttccggtcatgttggaataaaccacaacctcggctgggtgggagtcgatccttactcttctgcatacgccaacttcttcgataaaataagaccaaacgaagagaccctcgaggaagaagaagaggaggaggaggaggaagaagaagaggacggaggagcagaaattgagaccctccccctgttcccaatgcacggagaggacattcacggctactgcaacctcaagtccaacagttacaactacgacggcaacggctggtatcacagtgaggatggcttcaaaaacggcagtagggcctccctcgagctctccctcaactcttacaccagaagatcccccgacttcgcatag

SEQ ID NO: 93 - protein, 287 aa, Phaseolus vulgaris
MEPQQPQGSQPNEDGGSGKGGFLSRQSSTRWTPTTDQIRILKDLYYNNGIRSPSAEQIQRISARLRQYGKIEGKNVFYWFQNHKARERQKKRFTSDNVPMQRPAPTNAAPPWKPDQDPIHTKYSNISSTGISSASSSSVEMITVGQMGNYGYGSVPMEKSFRDCSISAGGSSGHVGINHNLGWVGVDPYSSAYANFFDKIRPNEETLEEEEEEEEEEEEEDGGAEIETLPLFPMHGEDIHGYCNLKSNSYNYDGNGWYHSEDGFKNGSRASLELSLNSYTRRSPDFA

SEQ ID NO: 94 - DNA, 963 bp, Zea mays
atggcggccaacgtgggcgcgggcaggagtgctggcggcggcggagccggcactggcactggcactgctgctggcagcggcggcgtgtcgacggccgtgtgccgccctagcggctcgcggtggacgccgacgccggagcagatcaggatcctcaaggagctctactacggctgcggcatccggtcgcccaactcggagcagatccagcgcatcaccgccatgctgcggcagcacggcaagatcgagggcaagaacgtcttctactggttccagaaccacaaggcccgcgagcgccagaagcgccgcctcaccaacctcgacgtcaacgtgcccgtcgccgccgacgacagcgcccaccgccttggcgtcctctcgttgtcgccttcttcaggttgttcaggcgcggcgcctccgtcgcccaccctcggcttctacgccggcggcaatggctccgctgtgatgctggacacgagttccgattggggcagcgctgctgccatggccactgaggcatgcttcatgcaggactacatgggcgtgatgggcggcgcgtcaccgtgggcatgctcctcctcgtcgtcggaggacccgatggcggcgctggcgctggcgccgaaggtgacccgggcgcccgagacgctccctctcttcccgaccggcggcggcggagacgataggcagcccccgcggccgcggcagtctgtcccagcaggcgaggccatccgcggcggcagcagcagcagcagctaccttccgttctggggtgccgcgcccaccccaactggcagtgccacttccgttgcgatccagcagcaacaccagctgatgcagatgcaagagcagtacagcttttacagcaacgcccagctgctgcccggcaccggcagccaggatgcagcagcaacatccctggagctgagcctcagctcctggtgctccccttaccctgcagggaccatgtga

SEQ ID NO: 95 - protein, 320 aa, Zea mays
MAANVGAGRSAGGGGAGTGTGTAAGSGGVSTAVCRPSGSRWTPTPEQIRILKELYYGCGIRSPNSEQIQRITAMLRQHGKIEGKNVFYWFQNHKARERQKRRLTNLDVNVPVAADDSAHRLGVLSLSPSSGCSGAAPPSPTLGFYAGGNGSAVMLDTSSDWGSAAAMATEACFMQDYMGVMGGASPWACSSSSSEDPMAALALAPKVTRAPETLPLFPTGGGGDDRQPPRPRQSVPAGEAIRGGSSSSSYLPFWGAAPTPTGSATSVAIQQQHQLMQMQEQYSFYSNAQLLPGTGSQDAAATSLELSLSSWCSPYPAGTM

SEQ ID NO: 96 - DNA, 978 bp, Zea mays
atggcggccaatgcgggcggcggtggagcgggaggaggcagcggcagcggcagcgtggctgcgccggcggtgtgccgccccagcggctcgcggtggacgccgacgccggagcagatcaggatgctgaaggagctctactacggctgcggcatccggtcgcccagctcggagcagatccagcgcatcaccgccatgctgcggcagcacggcaagatcgagggcaagaacgtcttctactggttccagaaccacaaggcccgcgagcgccagaagcgccgcctcaccagcctcgacgtcaacgtgcccgccgccggcgcggccgacgccaccaccagccaactcggcgtcctctcgctgtcgtcgccgccttcaggcgcggcgcctccctcgcccaccctcggcttctacgccgccggcaatggcggcggatcggctgggctgctggacacgagttccgactggggcagcagcggcgctgccatggccaccgagacatgcttcctgcaggactacatgggcgtgacggacacgggcagctcgtcgcagtggccatgcttctcgtcgtcggacacgataatggcggcggcggcggccgcggcgcgggtggcgacgacgcgggcgcccgagacactccctctcttcccgacctgcggcgacgacgacgacgacgacagccagcccccgccgcggccgcggcacgcagtcccagtcccggcaggcgagaccatccgcggcggcggcggcagcagcagcagctacttgccgttctggggtgccggtgccgcgtccacaactgccggcgccacttcttccgttgcgatccagcagcaacaccagctgcaggagcagtacagcttttacagcaacagcacccagctggccggcaccggcagccaagacgtatcggcttcagcggccgccctggagctgagcctcagctcatggtgctccccttaccctgctgcagggagcatgtga

SEQ ID NO: 97 - protein, 325 aa, Zea mays
MAANAGGGGAGGGSGSGSVAAPAVCRPSGSRWTPTPEQIRMLKELYYGCGIRSPSSEQIQRITAMLRQHGKIEGKNVFYWFQNHKARERQKRRLTSLDVNVPAAGAADATTSQLGVLSLSSPPSGAAPPSPTLGFYAAGNGGGSAGLLDTSSDWGSSGAAMATETCFLQDYMGVTDTGSSSQWPCFSSSDTIMAAAAAAARVATTRAPETLPLFPTCGDDDDDDSQPPPRPRHAVPVPAGETIRGGGGSSSSYLPFWGAGAASTTAGATSSVAIQQQHQLQEQYSFYSNSTQLAGTGSQDVSASAAALELSLSSWCSPYPAAGSM

SEQ ID NO: 98 - DNA, 666 bp, Zea mays
atggaggcgctgagcgggcgggtaggcgtcaagtgcgggcggtggaaccctacggcggagcaggtgaaggtcctgacggagctcttccgcgcggggctgcggacgcccagcacggagcagatccagcgcatctccacccacctcagcgccttcggcaaggtggagagcaagaacgtcttctactggttccagaaccacaaggcccgcgagcgccaccaccacaagaagcgacgccgcggcgcgtcgtcgtcctcccccgacagcggcagcggcaggggaagcaacaacgaggaagacggccgtggtgccgcctcgcagtcgcacgacgccgacgccgacgccgacctcgtgctgcaaccgccagagagcaagcgggaggccagaagctatggccaccatcaccggctcgtgacatgctacgtcagggacgtggtggagcagcaggaggcgtcgccgtcgtgggagcggccgacgagggaggtggagacgctagagctcttccccctcaagtcgtacggcgacctcgaggcggcggagaaggtccggtcgtacgtcagaggaagcggcgccaccagcgagcagtgcagggagttgtccttcttcgacgtcgtctccgccggccgggatccgccgctcgagctcaggctctgcagcttcggtccctag

SEQ ID NO: 99 - protein, 221 aa, Zea mays
MEALSGRVGVKCGRWNPTAEQVKVLTELFRAGLRTPSTEQIQRISTHLSAFGKVESKNVFYWFQNHKARERHHHKKRRRGASSSSPDSGSGRGSNNEEDGRGAASQSHDADADADLVLQPPESKREARSYGHHHRLVTCYVRDVVEQQEASPSWERPTREVETLELFPLKSYGDLEAAEKVRSYVRGSGATSEQCRELSFFDVVSAGRDPPLELRLCSFGP

SEQ ID NO: 100 - DNA, 975 bp, Zea mays
atggagacgccacagcagcaatccgccgccgccgccgccgccgccgcccacgggcaggacgacggcgggtcgccgccgatgtcgccggcctccgccgcggcggcggcgctggcgaacgcgcggtggaacccgaccaaggagcaggtggccgtgctggaggggctgtacgagcacggcctgcgcacccccagcgcggagcagatacagcagatcacgggcaggctgcgggagcacggcgccatcgagggcaagaacgtcttctactggttccagaaccacaaggcccgccagcgccagaggcagaagcaggacagcttcgcctacttcagcaggctcctccgccggcccccgccgctgcccgtgctctccatgccccccgcgccaccgtaccatcacgcccgcgtcccggcgccgcccgcgataccgatgccgatggcgccgccgccgcccgctgcatgcaacgacaacggcggcgcgcgtgtgatctacaggaacccattctacgtggctgcgccgcaggcgccccctgcaaatgccgcctactactacccacagccacagcagcagcagcagcagcaggtgacagtcatgtaccagtacccgagaatggaggtagccggccaggacaagatgatgaccagggccgcggcgcaccagcagcagcagcacaacggcgccgggcaacaaccgggacgcgccggccaccccagccgcgagacgctccagctgttcccgctccagcccaccttcgtgctgcggcacgacaaggggcgcgccgccaacggcagtaataacgactccctgacgtcgacgtcgacggcgactgcgacagcgacagcgacagcgacagcgtccgcttccatctccgaggactcggatggcctggagagcggcagctccggcaagggcgtcgaggaggcgcccgcgctgccgttctatgacttcttcgggctccagtcctccggaggccgctga

SEQ ID NO: 101 - protein, 324 aa, Zea mays
METPQQQSAAAAAAAAHGQDDGGSPPMSPASAAAAALANARWNPTKEQVAVLEGLYEHGLRTPSAEQIQQITGRLREHGAIEGKNVFYWFQNHKARQRQRQKQDSFAYFSRLLRRPPPLPVLSMPPAPPYHHARVPAPPAIPMPMAPPPPAACNDNGGARVIYRNPFYVAAPQAPPANAAYYYPQPQQQQQQQVTVMYQYPRMEVAGQDKMMTRAAAHQQQQHNGAGQQPGRAGHPSRETLQLFPLQPTFVLRHDKGRAANGSNNDSLTSTSTATATATATATASASISEDSDGLESGSSGKGVEEAPALPFYDFFGLQSSGGR

SEQ ID NO: 102 - DNA, 543 bp, Zea mays
atgcatggtgtacgtacgtatctcttaattttcattgtatcaaagctgcaggtgcaagtgccgccgacgacgacgacggtgggtggcacgacgcggtggaacccgtcgccggaccagataagggtgctggagatgctgtaccgcggggggatgcgcacgcccaactcgttccagatcgagcagatcacggaggagctcggcaagtacggccggatcgagggcaagaacgtcttctactggttccagaaccacaaggcccgcgagcgccagaagcagaagcgagctgccctcctcaccctcagcaccaccaccactgcttccacgctgctaccaccagctgctgaaaccaaggagggagtggagacgaaaaaagaagaagcgtgtgaagatgcatcgagccgcaagcggaggtgcagggcctgggaagatgtcgtcgtccatggtggcggcgacgatgccggtacggaggtagctgacgactactacaccgacgacgatgtgaccctggagctcttcccgctgcgtcctgatcaggggaaataa

SEQ ID NO: 103 - protein, 180 aa, Zea mays
MHGVRTYLLIFIVSKLQVQVPPTTTTVGGTTRWNPSPDQIRVLEMLYRGGMRTPNSFQIEQITEELGKYGRIEGKNVFYWFQNHKARERQKQKRAALLTLSTTTTASTLLPPAAETKEGVETKKEEACEDASSRKRRCRAWEDVVVHGGGDDAGTEVADDYYTDDDVTLELFPLRPDQGK

SEQ ID NO: 104 - DNA, 708 bp, Zea mays
atggacacggaggcgccgagcgggcgggtgggcgtcaagtgcgggcggtggaacccgacgccggagcaggtgaaggtcctgacggagctcttccgcgcggggctgcggacgcccagcacggaccagatccagcgcatctccgcccacctcggcgccttcggcaaggtggagagcaagaacgtcttctactggttccagaaccacaaggcccgcgagcgccaccaccacaagaagaagaagcgccgccgacgcggcgcggcaatggcatcgtcgtcctcccccgacagcggcagcggcagcgggagcagcgaggaagacggccgtgttgccgccgccgccgacgccgacctcgtgctgcaaccatcgccgggaagaagcaaaagcaaacgggaggccagaagaagctacggcggcggccaccatcgccggctcgttacatgtaagcagctagcgcacacacatcgctacgtcagggacgttgtggagcagcaggaggaggacacgtgggagcggccgacgagggaggcggtggagactctggagctcttccccctcaagtcgtacgtcgacctcgaggcggagaaggtccggcggtacgtcgtcagggccggcgccagcgagcagtgcagggacttctccttcttcgacgtgtccggcggtcgggatccgccgcttcttgagcttaggctctgcagcttcggtccctag

SEQ ID NO: 105 - protein, 235 aa, Zea mays
MDTEAPSGRVGVKCGRWNPTPEQVKVLTELFRAGLRTPSTDQIQRISAHLGAFGKVESKNVFYWFQNHKARERHHHKKKKRRRRGAAMASSSSPDSGSGSGSSEEDGRVAAAADADLVLQPSPGRSKSKREARRSYGGGHHRRLVTCKQLAHTHRYVRDVVEQQEEDTWERPTREAVETLELFPLKSYVDLEAEKVRRYVVRAGASEQCRDFSFFDVSGGRDPPLLELRLCSFGP

SEQ ID NO: 106 - DNA, 1545 bp, Zea mays
atggcctcctccttcaacaacaaaaccagtcactggccgagcatgtttaggtccaagcacgccgctgagccgtggcaggcgcagcctgacatcagcagctcgccgccgtcgctcctctcaggtggcggctctagcagcaccaccaccatcggccgctgcctcaagcaccccctctcaggttactcaggtggcgaggagcggaccccggatccgaagccccggtggaaccccaggccggagcagatccggattctggaggccatcttcaactccggcatggtcaacccgccgcgcgacgagatcccccgcatccgcatgcgcctgcaggagtacggccaggtcggcgacgccaacgtcttctactggttccagaaccgcaagtcccgctccaagaacaagcagcgcaccggacagctggggctgggccttgcgcgcgcgccgggttgcggggccgctgcgccgcccgtcacgccgcagcccttgatccagaaccaattccaggtgctcgcctcgcccgcgcaggcgccagcttcctcgtcctcgtcctcctccgaccgctcctctgggtccagcaagccggcgccgcagccgatgtccgcgacggcagcggccatgaactttccagggccgctcggcgcggcgtgtgcgcagatgtactaccaagcccaccccgtggcgccggtctcggcgttgccagcgcacaaggtgcaggaccctgtagcctccgacgagcccgtcttccagccgtggccacaaggctacttcctgtcggctgccgaggtcgccagcattctcgggggccagtacaggcacgacgtgcccgtgcagcagcagccaccggcgacgttgcctgcgggagcgttcttggggctgtacaacgaggtgacagagccgactgtcactggtcacaggacatgcgcctggggcccggcggggctcgggcagttctggcccgtgggcggcgctgatcaccatcagcaccacaagcacaataccaccgcggcgaccaacaccgtagcaagggacgcggcgcacgagcacgccacgacgctggggttgctgcagtacggcttcgaagctagcgcggccatggagacggcttccgcggcggtgccccttgctgcgtcgccgggaaccgctgcgagcgtggcgacggctgggctcacatctttgcctgcaagtactaatgctgttgtcgtcaactatgatctgctgcaaggactggcagtgcccgggtccgggtccggggccgtcggtgtcagcaccggcggtgcaccgcctgtcgccgttgccgcggcgcccacggcagcgcaggagggcgtcgtcgtagcactgtgcatcacggacagcgtcacgggcaagagcgtggcacacaacgtcgcggctgccaggctcgacgtgagggcgcagttcggcgaggcggccgttctgctccgcgccgtcggcgaccgcggcgggctcgacctcgtgcccgtccccgtcgacgcgttgggctgcacagtggagccgctccagcacggtgccttttactacgtgctggtataa

SEQ ID NO: 107 - protein, 514 aa, Zea mays
MASSFNNKTSHWPSMFRSKHAAEPWQAQPDISSSPPSLLSGGGSSSTTTIGRCLKHPLSGYSGGEERTPDPKPRWNPRPEQIRILEAIFNSGMVNPPRDEIPRIRMRLQEYGQVGDANVFYWFQNRKSRSKNKQRTGQLGLGLARAPGCGAAAPPVTPQPLIQNQFQVLASPAQAPASSSSSSSDRSSGSSKPAPQPMSATAAAMNFPGPLGAACAQMYYQAHPVAPVSALPAHKVQDPVASDEPVFQPWPQGYFLSAAEVASILGGQYRHDVPVQQQPPATLPAGAFLGLYNEVTEPTVTGHRTCAWGPAGLGQFWPVGGADHHQHHKHNTTAATNTVARDAAHEHATTLGLLQYGFEASAAMETASAAVPLAASPGTAASVATAGLTSLPASTNAVVVNYDLLQGLAVPGSGSGAVGVSTGGAPPVAVAAAPTAAQEGVVVALCITDSVTGKSVAHNVAAARLDVRAQFGEAAVLLRAVGDRGGLDLVPVPVDALGCTVEPLQHGAFYYVLV

SEQ ID NO: 108 - DNA, 2000 bp, Glycine max
tttaaatttgttgcagaatgatcataattaaatttccaaggcaataaaaatccctgtctacaaatttatttccataggggctttggatcgatggcgtggaccccacctgaaagtgacacccttggatctcacgggtttcagtgtcaaacctcatttaataagtcaccccatctcccacccttaatttccaccatccaattctccaatctccttcttcataaattaacggctgtgatctatttgaccctactactactttatgaccattctccattcggttacaaatcaatatttctctcactcccaaattaaaaaattgccaattaccaaacatgccatctctcaaaaagtacaaagtgttactattatttctatttaattagtatagtagtactctttctaataaatttaatattaaaatcacataattgtacgtactacttagtaattgagattcttcaaaataaagagaataactctcaggtaatttagtgaattctgaaagacaataaattgtgtttttgacaaatgttaatacaacaattttatacagtagtaatattttttatatcacaaaaactaaatataatttcatctgaataatctatttattttttaatgtaaatatttatcacttagattatcaagattacgatttttaaagaaaagattaacaagattacgaattgggttaagccaatttgtataagaaaattggatatcatatgcccatgaggtcttgggtcctgtccacaaggaaatttaactcatttttactctatatatacttctaacgtcatatattgcaacaataatatatgcgttactttgacgaaatttctactaacgttggcattgaagttgcttttagaagtacctatcaattttccacgatatttcagtcacattgaaacaacagttgaattcagaaaaaaaaaattaaaaaaattgaacttcaaatacttcacagtccaccttaaacatatcattcacattcatctaagataaaaatcaatcactaattttaattagataatagtattaatagaaacattaaaagccttatctttttataaagctgtttttcattttcatcacatccagcatcgatctcaatccaaactctttcttttcacaccctatgagtaactcaaacctgacatcatccaacacggcgcgtgtatcccactctcttccttggaagacgtaaggaggcaggaagcgcgtgggagaggaactgagaggaaaaaaaggtttgactttggtgaagggtgtgggaaacgtttagaatggccattaagaaagcaccacgtggagcgtaacagccgacgtagtaagtattgctgatcggtttctgtcaacccgcatttaccatttacagtaaatttattaaattaaattaaattaacccatttattacaacacactatgaattgaatgaatgaatatgagcattatatgaagagagagaggaacgtagaaaagaaaactaggataaggtaaaggactaaggagaaaaagaaagagaaagagagaaagggactctgtccccttttgtgtgcgtgtgttttgtcaactgagtgaactctcaagtgaactaacatcaccaaaaaaaccactctcttgcaacctcctcatcacattgctccttctggtattccatataacttattaactttgatttttttctctctttaattttttcttttcttccgatcatgtaacatgctaaaaaataatttgtaagattctggttggttggttttgtagggaatctttttctcttgtttttttctgggttgaatgagaataatgttttgatagtttaaagctttttatttgtttggtttctgatatgggaaagttttgttgtggggtgttagagacaggtttggctcaactgaagtaaggtttggttatcttattaccttatctctcaccacatttaaaaacacacaaaacacagttacacaagtgaagtgtggttttgggaagcaaga

SEQ ID NO: 109 - DNA, 2000 bp, Glycine max
atgaattattatatatgctctatttgttaaattttttaaaataattattttaaaagttatacatagatttttttattggttaatagtataaaattttaactctcacaaaacaccatgcacgaaaattaaactcatgaacaatataaatatacttttttatctgaaataaacgagggaaaatatctcttatttgagaaaaaaaatttaaaaatatttttgttactactatgtcataagttaatatcttggaagtttaaagaatattaacttgttaaaataattcaatattttttttgtctgtaatgtgttagccagtattaacacaattaatttgtttttggtaataacaatgcttagatatggcaagaaaactcatacttgtgggtatccgtctgaattcgtttcgactttgacgggtaatacctgagttgacctggtataggttcgggtttggatttttctcgataatcaaaagtcagatacgggtatgggtatgaggttactagactcgtcccgaccccaaacccgaactcgccctgccacttaaaatctttaaatttttttgcataatttaatcaaaaggcataaaatttttattactagttaattttattttagaatttttacataatttaatattattttcttaactatttttgtagacacatgcgctataataaatttattaatatataagtagttaaaacaaatgtttaacaattaactttctttttctaaaatcaaacttttaatattttttttataaaaaaaaatatttttttaatttaaatcgtgtatgggacagggtcggggataccggataggtacaggaatgagaaaataaatttaaacccgatatcgaatacgaatatgaagatatattgagaagttagaataagagattgagagacaatactcataaccatcccactctccattgcaatgtctaacaatgcttacacatgcacaagcaatgactcagctcaggtaacattcatacattctattaacatgttggcgtcacaagcattattataatacacccaatttttcctattaaatgaaaaagacgacgtaccgtatgcccctccaattaaacacaaccgacatggagaaaatgatgatggttgattgcctacgaaaggtgacaattcgtgaaaacaatgatgatatatgcttgctaaaagagaaataccaataaaatgtttacacattatttattattaactgaacattatataaattgtaaagagtttaataaatatatattgttaagttgaaagtttttgcagcattgttgcttgcacttcttgtgcaacaattctgaccttatttatacattatcaatcaattgaaaatatacagtttattatagatgatgattttaaaatttaacaaatttattataaataatgatttattagacaatggtgtaaaaaacttttatattttactaaaaacatgtttttttaaaatgtatgatgctattattcacgtttctcattttttaacagtcggttgaagacttttagtttagctgcttcacactaccaaggccattccttccccactttgaacaattcacatttttattattttttgcagtacccatatttttcaagtgacagcctactaatcattcaaaggtgtaaaaaattgaatttttattgctatccagcaaccacttttttgtttttttttttgtacaaaatatatagataccatatgtgacatgcctataataaattaataactgaaggctgataaaataaaaggttaataactgaaggtagttttatctacttgtctctacgtcaagaagcacgtgaacacaactgaaaggtgccaacaaaacatgttggaaggttagctacataatcttcggtggagcaaatattccacttgtgcacatgcatgcatatataattggttatttgcaatgcctcattccatgcactgaaactagttgcgacacttgtattgcagtgcacataataacc

SEQ ID NO: 110 - DNA, 2000 bp, Glycine max
acttcgatgttcttgcacttgttatagaattcatgtcataataagtgtgtgctcgaagtaaaaattaattttaattgttttttctatttatacttctaacattagcaatttgcataacaaacaagatttaatacaagattaattttgtaaaattgttactttttttatttattcttgctagaaaaagagaaagaacctttcacgaaaatcttcataatttcatttgaggttcacatatatctttggaagtggaggactacgatgcaacagtttatttattatttcagagaataaccattacccaaaatttctttgaccggagtagcttgtccatgaaataagacatggtggtaataaaaaaaaggattaattgaacattattgtcatggaatagtaaacatacataaattaaatgactcttcatgtctttttttcttcttcatcatgatattcataggaaataatcctcatttgactaattagttgggtcaccaggtgtaccaatagttattggtctttttctttttgagtaacaaataccattgaaaagtcatttaatttattatttgtatgtataatggtagatgatctggaggttattattatatctttttcgggtttgtgttaagtttatttatttttcttaataaatgattcattacaaaaggatttttttaagtgtatatttcttcttttttttctacttcttctttcaagggcaggaaaatctcatatattgtggtccttccttcaccactcccatgtggatggttcacgggttcataattactcacgcttacttagccaacatttagatatgactctatctaaatttttttgtttacttcaacatttctcacttgtcctacttttgttatcgaataatttttggatattaaatggaccttcccagaagttaattttaatgtggccaatttcttctcttttgtaattagctcttagacaataataataatgatatttctagattatctccatttattttcctattcatacgtgattctgttgtgcgattgaatgttagatagacggtgtagatgaggtgcaaaattttaattcagtctgacatgtttaattgtgaagaaaatgttgaaaaaaattaaaataaaagaaaagaaataaatgagaagagaatgcaaagtcttgaattaaataaaaaaatattaatagcaaaataattttaattaacaccacatgactatatcatacaataaatataaggaaaaaataaataagaaaaataattatttagcctgggttgaagcactagttgattttgaccgtgtgtagcaaaatgatccctctcctaagatacgacaaccagttggtttcgaccgacgtgtgcagcaaaagaatcccgaaacttgtgaacactaatgcttttgctctaaaaaataagtttttataggaaaagaaaaagaagatatttgggagaaaggagttatgtgcttgtgttgttcttttttagagaacaagaaatatatatatatatagagagagagagagagatagatcaccttgtgcagcaaacaaaaatatgatcattgtattcaacctatagttattaaaacaaacgtaatagaccagttgactcattaaaataaaatcttaagaaaatttaaaataaatattttattttataaaataaaattaatatatatttataaattttaaattaaaacacagatacttatcgatagaaaatagtaatagtgtgtaggatattaatgaaaggtgaaaggcttttttgttcacccccaagacttgttgatgttgagtcgttggtaacaatacacaccacctaacaccatcacgtgctcaccttcaatttacaatactcgaacgaaacgatttgttagattaagtaactgaaagattaatgttattatttaagaagcttctctcctgagggaggattaaaaaactgtctataaagtaagtttcattttatcctttgaagtgtgtgagagagtgaaaac

SEQ ID NO: 111 - DNA, 10324 bp, Artificial Sequence
  PHP80728 T-DNA
aattacaacggtatatatcctgtcagccaacaccaaaacatcaaaaaaatcgggatcaggatcaggatctgcggccgcatcctgcaggtttaaacggccggccttcactagctagctgctaagctcaaacgagcaggaagcaacgagagggtggcgcgcgaccgacgtgcgtacgtagcatgagcctgagtggagacgttggacgtgtatgtatatacctctctgcgtgttaactatgtacgtaagcggcaggcagtgcaataagtgtggctctgtagtatgtacgtgcgggtacgatgctgtaagctactgaggcaagtccataaataaataatgacacgtgcgtgttctataatctcttcgcttcttcatttgtccccttgcggagtttggcatccattgatgccgttacgctgagaacagacacagcagacgaaccaaaagtgagttcttgtatgaaactatgacccttcatcgctaggctcaaacagcaccccgtacgaacacagcaaattagtcatctaactattagcccctacatgtttcagacgatacataaatatagcccatccttagcaattagctattggccctgcccatcccaagcaatgatctcgaagtatttttaatatatagtatttttaatatgtagcttttaaaattagaagataattttgagacaaaaatctccaagtatttttttgggtattttttactgcctccgtttttctttatttctcgtcacctagtttaattttgtgctaatcggctataaacgaaacagagagaaaagttactctaaaagcaactccaacagattagatataaatcttatatcctgcctagagctgttaaaaagatagacaactttagtggattagtgtatgcaacaaactctccaaatttaagtatcccaactacccaacgcatatcgttcccttttcattggcgcacgaactttcacctgctatagccgacgtacatgttcgttttttttgggcggcgcttactttcttccccgttcgttctcagcatcgcaactcaatttgttatggcggagaagcccttgtatcccaggtagtaatgcacagatatgcattattattattcataaaatcgagctagttaccctatgaggtgacatgaagcgctcacggttactatgacggttagcttcacgactgttggtggcagtagcgtacgacttagctatagttccggacttacctaactgactagagtcacacttagctgaccctagtcacttaggcgcgccgtcgacggatccgtaccatcaactttgtataataaagttgcccggacctctagatatcggatcccggggttaaccttcagcttagaaatgatgtgttttctacacttttctcttcttttttttcttttcatctcacatgaatcaaaaagagaaagcttaattacattaaaggttgatgtgatatttactttctaaatatttgctagaagaaattataatgataacattaaattaagttatagtcatttctatttcggttgtctcccactttctgctatgcttttacaacaacagttcaagatttggaatcgttttctttctccaccaatcgtagtaatacttctttttgtgtttgttgaaattttgcaagattctctcttcctctggttaatacacataacttacttggtaagcttggctgcattttcttttcaagcttttaatcaaagactcactagaaattgcaaaggcaaacataaaattatgtgatcaaactcctactgtgagtttttggttacaaacaaaagttaaaaacaaaagcttgatatttaaaagataaactcaacacatatgcatttgactggcgcacagaagacaattcaagacttgggaaaacagtgagccatcaaaatcgtcagataattcagggaatatattgaatgtggagatgtggtaatcacactattgcacacaaagagtggcaaacaagcggcgcccttggtttggtatagtaagagacaattgttttggactgtttgtgttgccatattcacaaaaatactattgagctatgtatgttaaacattatggtcaatgagtagtagtgaacattcaagtttttttttttttccacttcaagtttttcatcttattattatttttcgttgtgatgcagtagtacggcccatcttcaccagtagtatatcaaagccgaaacagatgacaaattgtttaacatgcacttggattattattgagagttgaaatacaaaggcccgttacaagcccaaacgaaggtacataaaagaaaagcagaaaatgaaaacgaaatcgatagggataagtttttccaactgacggaaacacaaactacaccaggtgaaatagatcacctcccaagtgcatgagacacgaaccaaccacttatcatcagatcacaaaagagctcaaagatctagcgatcgcctaattcagtttgtggccaagctttgatggcaagtcgcaatatctagcgacggccacctcgtgctgctccacataagtctccttgtcggcctcttttatgcgctcgagtctatggtccacgtaatacacgccgggcattttcaagtttttggcaggctttttggagcggtaggtggtcttgaagttacagatgagatggcctccgccgacaagcttcaaggccatgtcggatctaccttcaagaccaccgtcggctgggtaaagcatttcagtattggcttcccagccgagagtcttcttctgcatcacgggaccgtttgatgggaagttcacgccgcggatcttgacgttgtagatcaagcagccgtcttgaagactagtgtcttgggtggcggtcaagactcctccgtcttcgtaggtggtcactctctcccaggtgaatccctctgggaatgactgtttgaagaagtctgggatgccctgggtgtggttgatgaaggttctactcccgtacatgaaggaggtggctagtatgtcgaaggcgaatgggagtggacctccttcgaccaccttgattctcatagtctgggttccctcatagggcttgccctcaccctcagaggtacacttgaagtggtgattattcacggtgccctccatgtataacttcatgtgcatgttctctttaatgagctcctcccccttggacaccatggctgtagagtcaacaatcacaagataaatcagaatcaaaatccatcacgtaatttcaagaagcaatttcgtgaaaaaaaatcctaatctatggccacagaatcaacaaataaggtagttgctaaaggacctgagcaatatctcttgaaataccatacagaatcaacgaataaggcttttatcaacggatctgaacaatttcttgaaaaacgactgaagtatcaacaaataaggctgttgtttaacggatctgaagtagttcatgaaaaaaaccttaatctacgactacagaatcaacaattaaggcttgttgtaaacggatctgaaaatctttatgaaaaaaactctaattagacctaatttacggttataaaatcatcaattaaggacgttcttgcattaataaaagctgaatcttctgattatgaaaatttataatcgatgaaacgatagaaaacacaatcaaatcaacatcatgctgatgtagaacaaacaataaagaagaagaaaaaaaaacggaagaaatctacgaaccttgaaaggagaggtagggaactgcgcaaagagaatgaactaatttgattgcaattgaagtgcgattagggtcgaggggtgtgggggcattttatagcatatgcggtggaaccgttctccaatcatattgtgacgcgtgcccatgtatggtgtgacttggtgtttatgacacagatgatatttcggggagtccttcgtagttgacggtttcgtaatcttgacggagtcagagatgtaccttcaccgcttcacgcttggctttatccgttaccacggcgttattaaattgggcccgcacccgttgcaagttaggaccacagtgtccattacctgaacggtcggctgctaccagtattttacattattaaaatctatggaaaagctgtcacgctagatttttttttttttttttatggataagaaaagactaataggaaagctttcttactccactaaagtctttaataattattttttcaattttcaaataaaatcataatcatcccactaaattctttctcatttgtttttcactttgtaagatattcttccgtagatttttataagtaattctttaagatacatagcataataaattgtatacttttagttacagtctatataaaattagtcatttaaaaaatatagccttaatgatttttttaaaatgaagttatttttttctaatttttctttcttatttattatcgaatgattttttctactaatcgtttagggaagagttttatttttctaatgacgagatgtgttaaatgatgcaacttgaaggcgacatattttttaccaataaaataaaactaaaagatagcttgttgacaaaaacaataattgatgttaaagaaaacgtaagggcaatgggtatcatctaattgttggacaagttgtcttctaaggctaggtaagcttttgttttttattagctgaaatatttatttaattgttctataaataaattttttaaaatgatttttaatgtttttaaatattatttaaaataatttttttaaaattttaacattttagtttttaattattttttatcttacttaaattaattataatttattattttctaccattttatactttccaattaattttatcgaagcattaataccatctggtattttgtcactgcttcgtatgattgtttattaaattttagcttctttcacattggagatgctgggcggtgtgagttacagcatggtgtgaagttaaggtggtttgattatggaacccgaaggtgttggtgcaaggtggataaaattgcttgccaggagatacataaaatgatttacaaaatgaaataaagaataaataaatagtcaagttcaaatttaaatcaaggattagaattatttttccgtacatgatgtaaccgcaatcaccccctgctgaatccagatggccattctggccgaatttaagtgactagggtcaccctgctgaatccagatggccattctggccgaatttaagtgactagggtcacgtgaccctagtcacttaccggattctggccgtaccgagctcgaattcggcccaacttttctatacaaagttgaggtacgagatccgcccatccggccggccagatcctgcaggagatccaagcttggcgcgccgcggacctgaattccagcacactggcggccgttactagtaacggccgccagtgtgctggaattcgcccttcccaagctttgctctagatcaaactcacatccaaacataacatggatatcttccttaccaatcatactaattattttgggttaaatattaatcattatttttaagatattaattaagaaattaaaagattttttaaaaaaatgtataaaattatattattcatgatttttcatacatttgattttgataataaatatattttttttaatttcttaaaaaatgttgcaagacacttattagacatagtcttgttctgtttacaaaagcattcatcatttaatacattaaaaaatatttaatactaacagtagaatcttcttgtgagtggtgtgggagtaggcaacctggcattgaaacgagagaaagagagtcagaaccagaagacaaataaaaagtatgcaacaaacaaatcaaaatcaaagggcaaaggctggggttggctcaattggttgctacattcaattttcaactcagtcaacggttgagattcactctgacttccccaatctaagccgcggatgcaaacggttgaatctaacccacaatccaatctcgttacttaggggcttttccgtcattaactcacccctgccacccggtttccctataaattggaactcaatgctcccctctaaactcgtatcgcttcagagttgagaccaagacacactcgttcatatatctctctgctcttctcttctcttctacctctcaaggtacttttcttctccctctaccaaatcctagattccgtggttcaatttcggatcttgcacttctggtttgctttgccttgctttttcctcaactgggtccatctaggatccatgtgaaactctactctttctttaatatctgcggaatacgcgtttgactttcagatctagtcgaaatcatttcataattgcctttctttcttttagcttatgagaaataaaatcactttttttttatttcaaaataaaccttgggccttgtgctgactgagatggggtttggtgattacagaattttagcgaattttgtaattgtacttgtttgtctgtagttttgttttgttttcttgtttctcatacattccttaggcttcaattttattcgagtataggtcacaataggaattcaaactttgagcaggggaattaatcccttccttcaaatccagtttgtttgtatatatgtttaaaaaatgaaacttttgctttaaattctattataactttttttatggctgaaatttttgcatgtgtctttgctctctgttgtaaatttactgtttaggtactaactctaggcttgttgtgcagtttttgaagtataacaacagaagttcctattccgaagttcctattctctagaaagtataggaacttccaccacacaacacaatggcggccaccgcttccagaaccacccgattctcttcttcctcttcacaccccaccttccccaaacgcattactagatccaccctccctctctctcatcaaaccctcaccaaacccaaccacgctctcaaaatcaaatgttccatctccaaaccccccacggcggcgcccttcaccaaggaagcgccgaccacggagcccttcgtgtcacggttcgcctccggcgaacctcgcaagggcgcggacatccttgtggaggcgctggagaggcagggcgtgacgacggtgttcgcgtaccccggcggtgcgtcgatggagatccaccaggcgctcacgcgctccgccgccatccgcaacgtgctcccgcgccacgagcagggcggcgtcttcgccgccgaaggctacgcgcgttcctccggcctccccggcgtctgcattgccacctccggccccggcgccaccaacctcgtgagcggcctcgccgacgctttaatggacagcgtcccagtcgtcgccatcaccggccaggtcgcccgccggatgatcggcaccgacgccttccaagaaaccccgatcgtggaggtgagcagatccatcacgaagcacaactacctcatcctcgacgtcgacgacatcccccgcgtcgtcgccgaggctttcttcgtcgccacctccggccgccccggtccggtcctcatcgacattcccaaagacgttcagcagcaactcgccgtgcctaattgggacgagcccgttaacctccccggttacctcgccaggctgcccaggccccccgccgaggcccaattggaacacattgtcagactcatcatggaggcccaaaagcccgttctctacgtcggcggtggcagtttgaattccagtgctgaattgaggcgctttgttgaactcactggtattcccgttgctagcactttaatgggtcttggaacttttcctattggtgatgaatattcccttcagatgctgggtatgcatggtactgtttatgctaactatgctgttgacaatagtgatttgttgcttgcctttggggtaaggtttgatgaccgtgttactgggaagcttgaggcttttgctagtagggctaagattgttcacattgatattgattctgccgagattgggaagaacaagcaggcgcacgtgtcggtttgcgcggatttgaagttggccttgaagggaattaatatgattttggaggagaaaggagtggagggtaagtttgatcttggaggttggagagaagagattaatgtgcagaaacacaagtttccattgggttacaagacattccaggacgcgatttctccgcagcatgctatcgaggttcttgatgagttgactaatggagatgctattgttagtactggggttgggcagcatcaaatgtgggctgcgcagttttacaagtacaagagaccgaggcagtggttgacctcagggggtcttggagccatgggttttggattgcctgcggctattggtgctgctgttgctaaccctggggctgttgtggttgacattgatggggatggtagtttcatcatgaatgttcaggagttggccactataagagtggagaatctcccagttaagatattgttgttgaacaatcagcatttgggtatggtggttcagttggaggataggttctacaagtccaatagagctcacacctatcttggagatccgtctagcgagagcgagatattcccaaacatgctcaagtttgctgatgcttgtgggataccggcagcgcgagtgacgaagaaggaagagcttagagcggcaattcagagaatgttggacacccctggcccctaccttcttgatgtcattgtgccccatcaggagcatgtgttgccgatgattcccagtaatggatccttcaaggatgtgataactgagggtgatggtagaacgaggtactgattgcctagaccaaatgttccttgatgcttgttttgtacaatatatataagataatgctgtcctagttgcaggatttggcctgtggtgagcatcatagtctgtagtagttttggtagcaagacattttattttccttttatttaacttactacatgcagtagcatctatctatctctgtagtctgatatctcctgttgtctgtattgtgccgttggattttttgctgtagtgagactgaaaatgatgtgctagtaataatatttctgttagaaatctaagtagagaatctgttgaagaagtcaaaagctaatggaatcaggttacatattcaatgtttttctttttttagcggttggtagacgtgtagattcaacttctcttggagctcacctaggcaatcagtaaaatgcatattccttttttaacttgccatttatttacttttagtggaaattgtgaccaatttgttcatgtagaacggatttggaccattgcgtccacaaaacgtctcttttgctcgatcttcacaaagcgataccgaaatccagagatagttttcaaaagtcagaaatggcaaagttataaatagtaaaacagaatagatgctgtaatcgacttcaataacaagtggcatcacgtttctagttctagacccatcagctgaggtacaaattaattaataagtgactagggtcacgtgaccctagtcacttatgattccgatgacttcgtaggttcctagctcaagccgctcgtgtccaagcgtcacttacgattagctaatgattacggcatctaggaccgactagttcttatgtgcttctagtctccaaatgtggttgatagttattttgctctaagatcaacagtaatgaagtataaatcatcgttgtggtgtgctactcggttaattgagcattaacacacacaaacatgacgaggatggtataatctccaaaaatgtgtactttgttaggtgggaccctatagccttgattaatgtgctatgttaggcatgcctggaaacgtgtgacgcatatgttttgtgaacctgttgatattatatgtgcttttatattaccatattttattaaaatactaatatttattactagtaagatataacattctatctagcttaaaaactaaccataaatattccataataactagatttaccaaactaatatactaaatatacataataaatacaaaattaacaagacaataatcaatatttatgagcttaatatatttagacattatggttggtcgacgataatcatgctaacttttcgtaattgcttgattgaaatatgcttagaataatgcctctttgttctacatggcaaatagggaccattatggtgtaacaccctgggaaccacaaacaccccgaaatgctactaaactacacaactaaccttcatatataaaatttcgacagcatctcctttgaaaatttgcatagacgtggaagcaacagagtataaacagatctagctagctaagtttaaacggccggccatttacaattgaatatatcctgcca

SEQ ID NO: 112 - DNA, 14348 bp, Artificial Sequence
  PHP80730 T-DNA
aattacaacggtatatatcctgtcagccaacaccaaaacatcaaaaaaatcgggatcaggatcaggatctgcggccgcatcctgcaggtttaaacggccggccttcactagctagctgctaagctcaaacgagcaggaagcaacgagagggtggcgcgcgaccgacgtgcgtacgtagcatgagcctgagtggagacgttggacgtgtatgtatatacctctctgcgtgttaactatgtacgtaagcggcaggcagtgcaataagtgtggctctgtagtatgtacgtgcgggtacgatgctgtaagctactgaggcaagtccataaataaataatgacacgtgcgtgttctataatctcttcgcttcttcatttgtccccttgcggagtttggcatccattgatgccgttacgctgagaacagacacagcagacgaaccaaaagtgagttcttgtatgaaactatgacccttcatcgctaggctcaaacagcaccccgtacgaacacagcaaattagtcatctaactattagcccctacatgtttcagacgatacataaatatagcccatccttagcaattagctattggccctgcccatcccaagcaatgatctcgaagtatttttaatatatagtatttttaatatgtagcttttaaaattagaagataattttgagacaaaaatctccaagtatttttttgggtattttttactgcctccgtttttctttatttctcgtcacctagtttaattttgtgctaatcggctataaacgaaacagagagaaaagttactctaaaagcaactccaacagattagatataaatcttatatcctgcctagagctgttaaaaagatagacaactttagtggattagtgtatgcaacaaactctccaaatttaagtatcccaactacccaacgcatatcgttcccttttcattggcgcacgaactttcacctgctatagccgacgtacatgttcgttttttttgggcggcgcttactttcttccccgttcgttctcagcatcgcaactcaatttgttatggcggagaagcccttgtatcccaggtagtaatgcacagatatgcattattattattcataaaatcgagctagttaccctatgaggtgacatgaagcgctcacggttactatgacggttagcttcacgactgttggtggcagtagcgtacgacttagctatagttccggacttacctaactgactagagtcacacttagctgaccctagtcacttaggcgcgccgtcgacggatccgtaccatcaactttgtataataaagttgcccgcggccgccggtacctctgttaatgaacgtaaggagcttctggatgacggctgggacttctttgacaaagagacagagctctaagtgtcttcttttcagtagattatcggtgctagaataaaagagatatgaagggattctgggttctgctctatgtagagtaaagcttggatctttgatctaatctaccgttagtataaaacatctattgagctctcttttatttttcttctcagtgtatagtttgcttattgtttttttggtgtttttttccacctctttgtggtactgacataaacaaagactatcgttttgtcatagaattttgagattttgaagaaaagttggataatttagtatactttttaactgactttataaaacgaattagcttcaattagagcttcacaattctcggattttactgaatgacaagttaacaatttaagctagaaaaaaatatgctctaagcctggacatgttgttagtcatggccagcgtatgtgtacattaggtaaatgaaaacaaaaacaaaaactttgaaggtttctgttaagaaaggaactaatttagcaataagagacatgatattacaagctcaacactgtcgctatatctaccagaagccaacaaatcttccagtgcgtaccattggagccacttttcaggctcattagacaaaagtagcacatataatgtaaagacgaaacgatgataaagagactcacaaggacataatttcaatacagaagaagtttgatgtcattactcattagaaagaaaggtataacacaggaacggaaacatagttgaacaattattcatcaggggctttacaaggccccaaaacacaaaccaccaaagttttaaatgaaacgagacatgaacttcttctgattcataacagagataagtttcctaggtcccaatctagttcagtctcaattccagggaagcgcatggtctgacctcggactgtccatacttccagatagcgccagatcctccgttgatgtggtcctcaccgtgcattggaaagagagggagagtccttctgtgttccaagtaagcatcacctccgcattcctcttcttcttggtgtccctccaagccgaagagaggtttagccctatcgaagaagttgtagggagcggaggagtagtggtgatccatgtttgcccatccgcctccaacgttgttgtagttcatggagcaatcttgctccatagagccgtacacgtgggaagacatgtagccgttggaggcgttgacaactccacattcggttccagaggaggcatggttgagattcccgttgttgaaagaggggtagggcttgttgtggtggtagaggtgatggtcctggttcaacttcacgttgacggagtttgcgggtctttgcataggaactccgtggtggtgatgaagcaaaggatggtagtggtcgttggcggccatcataacagaattgggtgatgaggaaggagtggtcatgttagtcccgttgaaacgcttcttctgcctctcacgagccttgtggttctggaaccagtagaagacgttcttaccctcgatcttaccgaattgacgcaggcgagcggtgatcttctgaatctgatcagcagtaggggagcggatggcattgttgtagtacaactccttcaggatcttgatctgctcagtggtaggtgtccatctggtggaggtctgtctgcaagtgtaccctccggaaccggacttgttgttgttgttgttcccggactcttgatcggcctgatggtggtgatgttggtgctgaggaggctccatggactcattagctagtaatagtattttctttgcttctgctatgtaatagtatttcctttcctttctgcccggccttatatatatatatatatcataccaccgacagaagaagaatatctgcatcctcatttaatatttattgcaacttccaagccgtgaacccgccggatatcctgccacttcttttttctgactcactgcatggtaacatgtggctcacacctgtccacatccaccagtaaaactccacccacaaatattactctctctggactcaaccattagacaaaaaattagttaatattatttaattttgataatttcaataaaaagttaatttattccttaaaatatcatctatattgattatataagaaaaaaaaataagattattaaaaataaaactcaattaaacgaatgatgttttgaaaatacatcattaagtaggtgataaagtaggtgatagttaattaaaatttgtttatattttaatctaacacaattgattttttttttattttttttacatttgaggtctaaagggagtattatgattaaagatttttttgtgtaattatgttagaattatctatcaattttattcataattaattttaacaaaactttatttaaaaaatttgaattcaatactatttggactaactacttgttggtagactctttctttttacacattttttttcatctctccaaataattttacaaatatgtaaaaagaaaacataattttataaataaaaaatgaaacaaaaattaatttctaaactgtatttaatacattaaatgctttttcctgaaatgcattaaatacttatttaatacattaaataagtttctttaatgcattaattttcaaaaattaatttaatacatttaagtaacttatttccgtaattagtaacagtcaaaataataagtgaggtcctttttattgattttttttattctagtttctatttttcaaatttttgtttttttattttatttcagaaaccagaacacatgctgaattaacaataactataatatgcatatataaaataatattctatatatatatatatttaaatataccataaatactatttaatatataaatattacgattataacaaatttaatactctctattgtcttaaatgtaagaaaaaagatcagccagagataagtggaatattccaattattttgtgagaaaatcatcatgcccaccagacaatagtagtagcgaaaagcaagacattctaacacataaattgggtgtttgataattctgtgtttttaagttagacttggtagagaggtgcgtattgaagggttccctcgctgcacgttgtaaaacaattatatccattctttatcaatatatatatatatatattttgtgtacaagctttaaacttcaaaacttactattcgaactctaccacttgcctgaccttatacaaagaagaagaattcagggtccttggtcaaacccacactagtttctccgtgtgtgtgtgtgtatacggattgtttgattaacgatagaattgtcatttacaagattacatgacaaaaaatcaactacttaacagttaaacaccacggagacattaattatctgacaggcaccatatgaacaatcgaaatgacaagtatcataaacattttttttagaaattcatgaactcctgtttaaacgaaagcaatataaactgtactggggtgaatatgccataaaaacagtaaactctaaaagatgcttttattgaaaaataacttttaaaatgttgtttatacgtaaaggtttttggcttaaaaatgggtttaactcctataaaatgagcgaaaattgattttgtaaacttttctttggaatgaatccctgatcattatttttgatccctattatcatggggaaacttgtatgtttaatggaaggttaagtaacccttccaatttctaattgatattcaatagtggttttggggctatgtcccgggccattctggcccactttgtacaagaaagctgggtctagatatctcgagtgcggccgcgaattcggtaccggatccagtcgactgaattggttccggcgccagcctgcttttttgtacaaacttgaagcttcggccggggccgcattcgcaaaacacacctagactagatttgttttgctaacccaattcgagctcggtacctcgcgaatgcatctagatatcggatcccggggttaaccttcagcttagaaatgatgtgttttctacacttttctcttcttttttttcttttcatctcacatgaatcaaaaagagaaagcttaattacattaaaggttgatgtgatatttactttctaaatatttgctagaagaaattataatgataacattaaattaagttatagtcatttctatttcggttgtctcccactttctgctatgcttttacaacaacagttcaagatttggaatcgttttctttctccaccaatcgtagtaatacttctttttgtgtttgttgaaattttgcaagattctctcttcctctggttaatacacataacttacttggtaagcttggctgcattttcttttcaagcttttaatcaaagactcactagaaattgcaaaggcaaacataaaattatgtgatcaaactcctactgtgagtttttggttacaaacaaaagttaaaaacaaaagcttgatatttaaaagataaactcaacacatatgcatttgactggcgcacagaagacaattcaagacttgggaaaacagtgagccatcaaaatcgtcagataattcagggaatatattgaatgtggagatgtggtaatcacactattgcacacaaagagtggcaaacaagcggcgcccttggtttggtatagtaagagacaattgttttggactgtttgtgttgccatattcacaaaaatactattgagctatgtatgttaaacattatggtcaatgagtagtagtgaacattcaagtttttttttttttccacttcaagtttttcatcttattattatttttcgttgtgatgcagtagtacggcccatcttcaccagtagtatatcaaagccgaaacagatgacaaattgtttaacatgcacttggattattattgagagttgaaatacaaaggcccgttacaagcccaaacgaaggtacataaaagaaaagcagaaaatgaaaacgaaatcgatagggataagtttttccaactgacggaaacacaaactacaccaggtgaaatagatcacctcccaagtgcatgagacacgaaccaaccacttatcatcagatcacaaaagagctcaaagatctagcgatcgcctaattcagtttgtggccaagctttgatggcaagtcgcaatatctagcgacggccacctcgtgctgctccacataagtctccttgtcggcctcttttatgcgctcgagtctatggtccacgtaatacacgccgggcattttcaagtttttggcaggctttttggagcggtaggtggtcttgaagttacagatgagatggcctccgccgacaagcttcaaggccatgtcggatctaccttcaagaccaccgtcggctgggtaaagcatttcagtattggcttcccagccgagagtcttcttctgcatcacgggaccgtttgatgggaagttcacgccgcggatcttgacgttgtagatcaagcagccgtcttgaagactagtgtcttgggtggcggtcaagactcctccgtcttcgtaggtggtcactctctcccaggtgaatccctctgggaatgactgtttgaagaagtctgggatgccctgggtgtggttgatgaaggttctactcccgtacatgaaggaggtggctagtatgtcgaaggcgaatgggagtggacctccttcgaccaccttgattctcatagtctgggttccctcatagggcttgccctcaccctcagaggtacacttgaagtggtgattattcacggtgccctccatgtataacttcatgtgcatgttctctttaatgagctcctcccccttggacaccatggctgtagagtcaacaatcacaagataaatcagaatcaaaatccatcacgtaatttcaagaagcaatttcgtgaaaaaaaatcctaatctatggccacagaatcaacaaataaggtagttgctaaaggacctgagcaatatctcttgaaataccatacagaatcaacgaataaggcttttatcaacggatctgaacaatttcttgaaaaacgactgaagtatcaacaaataaggctgttgtttaacggatctgaagtagttcatgaaaaaaaccttaatctacgactacagaatcaacaattaaggcttgttgtaaacggatctgaaaatctttatgaaaaaaactctaattagacctaatttacggttataaaatcatcaattaaggacgttcttgcattaataaaagctgaatcttctgattatgaaaatttataatcgatgaaacgatagaaaacacaatcaaatcaacatcatgctgatgtagaacaaacaataaagaagaagaaaaaaaaacggaagaaatctacgaaccttgaaaggagaggtagggaactgcgcaaagagaatgaactaatttgattgcaattgaagtgcgattagggtcgaggggtgtgggggcattttatagcatatgcggtggaaccgttctccaatcatattgtgacgcgtgcccatgtatggtgtgacttggtgtttatgacacagatgatatttcggggagtccttcgtagttgacggtttcgtaatcttgacggagtcagagatgtaccttcaccgcttcacgcttggctttatccgttaccacggcgttattaaattgggcccgcacccgttgcaagttaggaccacagtgtccattacctgaacggtcggctgctaccagtattttacattattaaaatctatggaaaagctgtcacgctagatttttttttttttttttatggataagaaaagactaataggaaagctttcttactccactaaagtctttaataattattttttcaattttcaaataaaatcataatcatcccactaaattctttctcatttgtttttcactttgtaagatattcttccgtagatttttataagtaattctttaagatacatagcataataaattgtatacttttagttacagtctatataaaattagtcatttaaaaaatatagccttaatgatttttttaaaatgaagttatttttttctaatttttctttcttatttattatcgaatgattttttctactaatcgtttagggaagagttttatttttctaatgacgagatgtgttaaatgatgcaacttgaaggcgacatattttttaccaataaaataaaactaaaagatagcttgttgacaaaaacaataattgatgttaaagaaaacgtaagggcaatgggtatcatctaattgttggacaagttgtcttctaaggctaggtaagcttttgttttttattagctgaaatatttatttaattgttctataaataaattttttaaaatgatttttaatgtttttaaatattatttaaaataatttttttaaaattttaacattttagtttttaattattttttatcttacttaaattaattataatttattattttctaccattttatactttccaattaattttatcgaagcattaataccatctggtattttgtcactgcttcgtatgattgtttattaaattttagcttctttcacattggagatgctgggcggtgtgagttacagcatggtgtgaagttaaggtggtttgattatggaacccgaaggtgttggtgcaaggtggataaaattgcttgccaggagatacataaaatgatttacaaaatgaaataaagaataaataaatagtcaagttcaaatttaaatcaaggattagaattatttttccgtacatgatgtaaccgcaatcaccccctgctgaatccagatggccattctggccgaatttaagtgactagggtcaccctgctgaatccagatggccattctggccgaatttaagtgactagggtcacgtgaccctagtcacttaccggattctggccgtaccgagctcgaattcggcccaacttttctatacaaagttgaggtacgagatccgcccatccggccggccagatcctgcaggagatccaagcttggcgcgccgcggacctgaattccagcacactggcggccgttactagtaacggccgccagtgtgctggaattcgcccttcccaagctttgctctagatcaaactcacatccaaacataacatggatatcttccttaccaatcatactaattattttgggttaaatattaatcattatttttaagatattaattaagaaattaaaagattttttaaaaaaatgtataaaattatattattcatgatttttcatacatttgattttgataataaatatattttttttaatttcttaaaaaatgttgcaagacacttattagacatagtcttgttctgtttacaaaagcattcatcatttaatacattaaaaaatatttaatactaacagtagaatcttcttgtgagtggtgtgggagtaggcaacctggcattgaaacgagagaaagagagtcagaaccagaagacaaataaaaagtatgcaacaaacaaatcaaaatcaaagggcaaaggctggggttggctcaattggttgctacattcaattttcaactcagtcaacggttgagattcactctgacttccccaatctaagccgcggatgcaaacggttgaatctaacccacaatccaatctcgttacttaggggcttttccgtcattaactcacccctgccacccggtttccctataaattggaactcaatgctcccctctaaactcgtatcgcttcagagttgagaccaagacacactcgttcatatatctctctgctcttctcttctcttctacctctcaaggtacttttcttctccctctaccaaatcctagattccgtggttcaatttcggatcttgcacttctggtttgctttgccttgctttttcctcaactgggtccatctaggatccatgtgaaactctactctttctttaatatctgcggaatacgcgtttgactttcagatctagtcgaaatcatttcataattgcctttctttcttttagcttatgagaaataaaatcactttttttttatttcaaaataaaccttgggccttgtgctgactgagatggggtttggtgattacagaattttagcgaattttgtaattgtacttgtttgtctgtagttttgttttgttttcttgtttctcatacattccttaggcttcaattttattcgagtataggtcacaataggaattcaaactttgagcaggggaattaatcccttccttcaaatccagtttgtttgtatatatgtttaaaaaatgaaacttttgctttaaattctattataactttttttatggctgaaatttttgcatgtgtctttgctctctgttgtaaatttactgtttaggtactaactctaggcttgttgtgcagtttttgaagtataacaacagaagttcctattccgaagttcctattctctagaaagtataggaacttccaccacacaacacaatggcggccaccgcttccagaaccacccgattctcttcttcctcttcacaccccaccttccccaaacgcattactagatccaccctccctctctctcatcaaaccctcaccaaacccaaccacgctctcaaaatcaaatgttccatctccaaaccccccacggcggcgcccttcaccaaggaagcgccgaccacggagcccttcgtgtcacggttcgcctccggcgaacctcgcaagggcgcggacatccttgtggaggcgctggagaggcagggcgtgacgacggtgttcgcgtaccccggcggtgcgtcgatggagatccaccaggcgctcacgcgctccgccgccatccgcaacgtgctcccgcgccacgagcagggcggcgtcttcgccgccgaaggctacgcgcgttcctccggcctccccggcgtctgcattgccacctccggccccggcgccaccaacctcgtgagcggcctcgccgacgctttaatggacagcgtcccagtcgtcgccatcaccggccaggtcgcccgccggatgatcggcaccgacgccttccaagaaaccccgatcgtggaggtgagcagatccatcacgaagcacaactacctcatcctcgacgtcgacgacatcccccgcgtcgtcgccgaggctttcttcgtcgccacctccggccgccccggtccggtcctcatcgacattcccaaagacgttcagcagcaactcgccgtgcctaattgggacgagcccgttaacctccccggttacctcgccaggctgcccaggccccccgccgaggcccaattggaacacattgtcagactcatcatggaggcccaaaagcccgttctctacgtcggcggtggcagtttgaattccagtgctgaattgaggcgctttgttgaactcactggtattcccgttgctagcactttaatgggtcttggaacttttcctattggtgatgaatattcccttcagatgctgggtatgcatggtactgtttatgctaactatgctgttgacaatagtgatttgttgcttgcctttggggtaaggtttgatgaccgtgttactgggaagcttgaggcttttgctagtagggctaagattgttcacattgatattgattctgccgagattgggaagaacaagcaggcgcacgtgtcggtttgcgcggatttgaagttggccttgaagggaattaatatgattttggaggagaaaggagtggagggtaagtttgatcttggaggttggagagaagagattaatgtgcagaaacacaagtttccattgggttacaagacattccaggacgcgatttctccgcagcatgctatcgaggttcttgatgagttgactaatggagatgctattgttagtactggggttgggcagcatcaaatgtgggctgcgcagttttacaagtacaagagaccgaggcagtggttgacctcagggggtcttggagccatgggttttggattgcctgcggctattggtgctgctgttgctaaccctggggctgttgtggttgacattgatggggatggtagtttcatcatgaatgttcaggagttggccactataagagtggagaatctcccagttaagatattgttgttgaacaatcagcatttgggtatggtggttcagttggaggataggttctacaagtccaatagagctcacacctatcttggagatccgtctagcgagagcgagatattcccaaacatgctcaagtttgctgatgcttgtgggataccggcagcgcgagtgacgaagaaggaagagcttagagcggcaattcagagaatgttggacacccctggcccctaccttcttgatgtcattgtgccccatcaggagcatgtgttgccgatgattcccagtaatggatccttcaaggatgtgataactgagggtgatggtagaacgaggtactgattgcctagaccaaatgttccttgatgcttgttttgtacaatatatataagataatgctgtcctagttgcaggatttggcctgtggtgagcatcatagtctgtagtagttttggtagcaagacattttattttccttttatttaacttactacatgcagtagcatctatctatctctgtagtctgatatctcctgttgtctgtattgtgccgttggattttttgctgtagtgagactgaaaatgatgtgctagtaataatatttctgttagaaatctaagtagagaatctgttgaagaagtcaaaagctaatggaatcaggttacatattcaatgtttttctttttttagcggttggtagacgtgtagattcaacttctcttggagctcacctaggcaatcagtaaaatgcatattccttttttaacttgccatttatttacttttagtggaaattgtgaccaatttgttcatgtagaacggatttggaccattgcgtccacaaaacgtctcttttgctcgatcttcacaaagcgataccgaaatccagagatagttttcaaaagtcagaaatggcaaagttataaatagtaaaacagaatagatgctgtaatcgacttcaataacaagtggcatcacgtttctagttctagacccatcagctgaggtacaaattaattaataagtgactagggtcacgtgaccctagtcacttatgattccgatgacttcgtaggttcctagctcaagccgctcgtgtccaagcgtcacttacgattagctaatgattacggcatctaggaccgactagttcttatgtgcttctagtctccaaatgtggttgatagttattttgctctaagatcaacagtaatgaagtataaatcatcgttgtggtgtgctactcggttaattgagcattaacacacacaaacatgacgaggatggtataatctccaaaaatgtgtactttgttaggtgggaccctatagccttgattaatgtgctatgttaggcatgcctggaaacgtgtgacgcatatgttttgtgaacctgttgatattatatgtgcttttatattaccatattttattaaaatactaatatttattactagtaagatataacattctatctagcttaaaaactaaccataaatattccataataactagatttaccaaactaatatactaaatatacataataaatacaaaattaacaagacaataatcaatatttatgagcttaatatatttagacattatggttggtcgacgataatcatgctaacttttcgtaattgcttgattgaaatatgcttagaataatgcctctttgttctacatggcaaatagggaccattatggtgtaacaccctgggaaccacaaacaccccgaaatgctactaaactacacaactaaccttcatatataaaatttcgacagcatctcctttgaaaatttgcatagacgtggaagcaacagagtataaacagatctagctagctaagtttaaacggccggccatttacaattgaatatatcctgcca

SEQ ID NO: 113 - DNA, 14348 bp, Artificial Sequence
  PHP80734 T-DNA
aattacaacggtatatatcctgtcagccaacaccaaaacatcaaaaaaatcgggatcaggatcaggatctgcggccgcatcctgcaggtttaaacggccggccttcactagctagctgctaagctcaaacgagcaggaagcaacgagagggtggcgcgcgaccgacgtgcgtacgtagcatgagcctgagtggagacgttggacgtgtatgtatatacctctctgcgtgttaactatgtacgtaagcggcaggcagtgcaataagtgtggctctgtagtatgtacgtgcgggtacgatgctgtaagctactgaggcaagtccataaataaataatgacacgtgcgtgttctataatctcttcgcttcttcatttgtccccttgcggagtttggcatccattgatgccgttacgctgagaacagacacagcagacgaaccaaaagtgagttcttgtatgaaactatgacccttcatcgctaggctcaaacagcaccccgtacgaacacagcaaattagtcatctaactattagcccctacatgtttcagacgatacataaatatagcccatccttagcaattagctattggccctgcccatcccaagcaatgatctcgaagtatttttaatatatagtatttttaatatgtagcttttaaaattagaagataattttgagacaaaaatctccaagtatttttttgggtattttttactgcctccgtttttctttatttctcgtcacctagtttaattttgtgctaatcggctataaacgaaacagagagaaaagttactctaaaagcaactccaacagattagatataaatcttatatcctgcctagagctgttaaaaagatagacaactttagtggattagtgtatgcaacaaactctccaaatttaagtatcccaactacccaacgcatatcgttcccttttcattggcgcacgaactttcacctgctatagccgacgtacatgttcgttttttttgggcggcgcttactttcttccccgttcgttctcagcatcgcaactcaatttgttatggcggagaagcccttgtatcccaggtagtaatgcacagatatgcattattattattcataaaatcgagctagttaccctatgaggtgacatgaagcgctcacggttactatgacggttagcttcacgactgttggtggcagtagcgtacgacttagctatagttccggacttacctaactgactagagtcacacttagctgaccctagtcacttaggcgcgccgtcgacggatccgtaccatcaactttgtataataaagttgcccgcggccgccggtacctctgttaatgaacgtaaggagcttctggatgacggctgggacttctttgacaaagagacagagctctaagtgtcttcttttcagtagattatcggtgctagaataaaagagatatgaagggattctgggttctgctctatgtagagtaaagcttggatctttgatctaatctaccgttagtataaaacatctattgagctctcttttatttttcttctcagtgtatagtttgcttattgtttttttggtgtttttttccacctctttgtggtactgacataaacaaagactatcgttttgtcatagaattttgagattttgaagaaaagttggataatttagtatactttttaactgactttataaaacgaattagcttcaattagagcttcacaattctcggattttactgaatgacaagttaacaatttaagctagaaaaaaatatgctctaagcctggacatgttgttagtcatggccagcgtatgtgtacattaggtaaatgaaaacaaaaacaaaaactttgaaggtttctgttaagaaaggaactaatttagcaataagagacatgatattacaagctcaacactgtcgctatatctaccagaagccaacaaatcttccagtgcgtaccattggagccacttttcaggctcattagacaaaagtagcacatataatgtaaagacgaaacgatgataaagagactcacaaggacataatttcaatacagaagaagtttgatgtcattactcattagaaagaaaggtataacacaggaacggaaacatagttgaacaattattcatcaggggctttacaaggccccaaaacacaaaccaccaaagttttaaatgaaacgagacatgaacttcttctgattcataacagagataagtttcctaggtcccaatctagttcagtctcaattccagggaagcgcatggtctgacctcggactgtccatacttccagatagcgccagatcctccgttgatgtggtcctcaccgtgcattggaaagagagggagagtccttctgtgttccaagtaagcatcacctccgcattcctcttcttcttggtgtccctccaagccgaagagaggtttagccctatcgaagaagttgtagggagcggaggagtagtggtgatccatgtttgcccatccgcctccaacgttgttgtagttcatggagcaatcttgctccatagagccgtacacgtgggaagacatgtagccgttggaggcgttgacaactccacattcggttccagaggaggcatggttgagattcccgttgttgaaagaggggtagggcttgttgtggtggtagaggtgatggtcctggttcaacttcacgttgacggagtttgcgggtctttgcataggaactccgtggtggtgatgaagcaaaggatggtagtggtcgttggcggccatcataacagaattgggtgatgaggaaggagtggtcatgttagtcccgttgaaacgcttcttctgcctctcacgagccttgtggttctggaaccagtagaagacgttcttaccctcgatcttaccgaattgacgcaggcgagcggtgatcttctgaatctgatcagcagtaggggagcggatggcattgttgtagtacaactccttcaggatcttgatctgctcagtggtaggtgtccatctggtggaggtctgtctgcaagtgtaccctccggaaccggacttgttgttgttgttgttcccggactcttgatcggcctgatggtggtgatgttggtgctgaggaggctccatggtcttgcttcccaaaaccacacttcacttgtgtaactgtgttttgtgtgtttttaaatgtggtgagagataaggtaataagataaccaaaccttacttcagttgagccaaacctgtctctaacaccccacaacaaaactttcccatatcagaaaccaaacaaataaaaagctttaaactatcaaaacattattctcattcaacccagaaaaaaacaagagaaaaagattccctacaaaaccaaccaaccagaatcttacaaattattttttagcatgttacatgatcggaagaaaagaaaaaattaaagagagaaaaaaatcaaagttaataagttatatggaataccagaaggagcaatgtgatgaggaggttgcaagagagtggtttttttggtgatgttagttcacttgagagttcactcagttgacaaaacacacgcacacaaaaggggacagagtccctttctctctttctctttctttttctccttagtcctttaccttatcctagttttcttttctacgttcctctctctcttcatataatgctcatattcattcattcaattcatagtgtgttgtaataaatgggttaatttaatttaatttaataaatttactgtaaatggtaaatgcgggttgacagaaaccgatcagcaatacttactacgtcggctgttacgctccacgtggtgctttcttaatggccattctaaacgtttcccacacccttcaccaaagtcaaacctttttttcctctcagttcctctcccacgcgcttcctgcctccttacgtcttccaaggaagagagtgggatacacgcgccgtgttggatgatgtcaggtttgagttactcatagggtgtgaaaagaaagagtttggattgagatcgatgctggatgtgatgaaaatgaaaaacagctttataaaaagataaggcttttaatgtttctattaatactattatctaattaaaattagtgattgatttttatcttagatgaatgtgaatgatatgtttaaggtggactgtgaagtatttgaagttcaatttttttaattttttttttctgaattcaactgttgtttcaatgtgactgaaatatcgtggaaaattgataggtacttctaaaagcaacttcaatgccaacgttagtagaaatttcgtcaaagtaacgcatatattattgttgcaatatatgacgttagaagtatatatagagtaaaaatgagttaaatttccttgtggacaggacccaagacctcatgggcatatgatatccaattttcttatacaaattggcttaacccaattcgtaatcttgttaatcttttctttaaaaatcgtaatcttgataatctaagtgataaatatttacattaaaaaataaatagattattcagatgaaattatatttagtttttgtgatataaaaaatattactactgtataaaattgttgtattaacatttgtcaaaaacacaatttattgtctttcagaattcactaaattacctgagagttattctctttattttgaagaatctcaattactaagtagtacgtacaattatgtgattttaatattaaatttattagaaagagtactactatactaattaaatagaaataatagtaacactttgtactttttgagagatggcatgtttggtaattggcaattttttaatttgggagtgagagaaatattgatttgtaaccgaatggagaatggtcataaagtagtagtagggtcaaatagatcacagccgttaatttatgaagaaggagattggagaattggatggtggaaattaagggtgggagatggggtgacttattaaatgaggtttgacactgaaacccgtgagatccaagggtgtcactttcaggtggggtccacgccatcgatccaaagcccctatggaaataaatttgtagacagggatttttattgccttggaaatttaattatgatcattctgcaacaaatttaaacccgggccattctggcccactttgtacaagaaagctgggtctagatatctcgagtgcggccgcgaattcggtaccggatccagtcgactgaattggttccggcgccagcctgcttttttgtacaaacttgaagcttcggccggggccgcattcgcaaaacacacctagactagatttgttttgctaacccaattcgagctcggtacctcgcgaatgcatctagatatcggatcccggggttaaccttcagcttagaaatgatgtgttttctacacttttctcttcttttttttcttttcatctcacatgaatcaaaaagagaaagcttaattacattaaaggttgatgtgatatttactttctaaatatttgctagaagaaattataatgataacattaaattaagttatagtcatttctatttcggttgtctcccactttctgctatgcttttacaacaacagttcaagatttggaatcgttttctttctccaccaatcgtagtaatacttctttttgtgtttgttgaaattttgcaagattctctcttcctctggttaatacacataacttacttggtaagcttggctgcattttcttttcaagcttttaatcaaagactcactagaaattgcaaaggcaaacataaaattatgtgatcaaactcctactgtgagtttttggttacaaacaaaagttaaaaacaaaagcttgatatttaaaagataaactcaacacatatgcatttgactggcgcacagaagacaattcaagacttgggaaaacagtgagccatcaaaatcgtcagataattcagggaatatattgaatgtggagatgtggtaatcacactattgcacacaaagagtggcaaacaagcggcgcccttggtttggtatagtaagagacaattgttttggactgtttgtgttgccatattcacaaaaatactattgagctatgtatgttaaacattatggtcaatgagtagtagtgaacattcaagtttttttttttttccacttcaagtttttcatcttattattatttttcgttgtgatgcagtagtacggcccatcttcaccagtagtatatcaaagccgaaacagatgacaaattgtttaacatgcacttggattattattgagagttgaaatacaaaggcccgttacaagcccaaacgaaggtacataaaagaaaagcagaaaatgaaaacgaaatcgatagggataagtttttccaactgacggaaacacaaactacaccaggtgaaatagatcacctcccaagtgcatgagacacgaaccaaccacttatcatcagatcacaaaagagctcaaagatctagcgatcgcctaattcagtttgtggccaagctttgatggcaagtcgcaatatctagcgacggccacctcgtgctgctccacataagtctccttgtcggcctcttttatgcgctcgagtctatggtccacgtaatacacgccgggcattttcaagtttttggcaggctttttggagcggtaggtggtcttgaagttacagatgagatggcctccgccgacaagcttcaaggccatgtcggatctaccttcaagaccaccgtcggctgggtaaagcatttcagtattggcttcccagccgagagtcttcttctgcatcacgggaccgtttgatgggaagttcacgccgcggatcttgacgttgtagatcaagcagccgtcttgaagactagtgtcttgggtggcggtcaagactcctccgtcttcgtaggtggtcactctctcccaggtgaatccctctgggaatgactgtttgaagaagtctgggatgccctgggtgtggttgatgaaggttctactcccgtacatgaaggaggtggctagtatgtcgaaggcgaatgggagtggacctccttcgaccaccttgattctcatagtctgggttccctcatagggcttgccctcaccctcagaggtacacttgaagtggtgattattcacggtgccctccatgtataacttcatgtgcatgttctctttaatgagctcctcccccttggacaccatggctgtagagtcaacaatcacaagataaatcagaatcaaaatccatcacgtaatttcaagaagcaatttcgtgaaaaaaaatcctaatctatggccacagaatcaacaaataaggtagttgctaaaggacctgagcaatatctcttgaaataccatacagaatcaacgaataaggcttttatcaacggatctgaacaatttcttgaaaaacgactgaagtatcaacaaataaggctgttgtttaacggatctgaagtagttcatgaaaaaaaccttaatctacgactacagaatcaacaattaaggcttgttgtaaacggatctgaaaatctttatgaaaaaaactctaattagacctaatttacggttataaaatcatcaattaaggacgttcttgcattaataaaagctgaatcttctgattatgaaaatttataatcgatgaaacgatagaaaacacaatcaaatcaacatcatgctgatgtagaacaaacaataaagaagaagaaaaaaaaacggaagaaatctacgaaccttgaaaggagaggtagggaactgcgcaaagagaatgaactaatttgattgcaattgaagtgcgattagggtcgaggggtgtgggggcattttatagcatatgcggtggaaccgttctccaatcatattgtgacgcgtgcccatgtatggtgtgacttggtgtttatgacacagatgatatttcggggagtccttcgtagttgacggtttcgtaatcttgacggagtcagagatgtaccttcaccgcttcacgcttggctttatccgttaccacggcgttattaaattgggcccgcacccgttgcaagttaggaccacagtgtccattacctgaacggtcggctgctaccagtattttacattattaaaatctatggaaaagctgtcacgctagatttttttttttttttttatggataagaaaagactaataggaaagctttcttactccactaaagtctttaataattattttttcaattttcaaataaaatcataatcatcccactaaattctttctcatttgtttttcactttgtaagatattcttccgtagatttttataagtaattctttaagatacatagcataataaattgtatacttttagttacagtctatataaaattagtcatttaaaaaatatagccttaatgatttttttaaaatgaagttatttttttctaatttttctttcttatttattatcgaatgattttttctactaatcgtttagggaagagttttatttttctaatgacgagatgtgttaaatgatgcaacttgaaggcgacatattttttaccaataaaataaaactaaaagatagcttgttgacaaaaacaataattgatgttaaagaaaacgtaagggcaatgggtatcatctaattgttggacaagttgtcttctaaggctaggtaagcttttgttttttattagctgaaatatttatttaattgttctataaataaattttttaaaatgatttttaatgtttttaaatattatttaaaataatttttttaaaattttaacattttagtttttaattattttttatcttacttaaattaattataatttattattttctaccattttatactttccaattaattttatcgaagcattaataccatctggtattttgtcactgcttcgtatgattgtttattaaattttagcttctttcacattggagatgctgggcggtgtgagttacagcatggtgtgaagttaaggtggtttgattatggaacccgaaggtgttggtgcaaggtggataaaattgcttgccaggagatacataaaatgatttacaaaatgaaataaagaataaataaatagtcaagttcaaatttaaatcaaggattagaattatttttccgtacatgatgtaaccgcaatcaccccctgctgaatccagatggccattctggccgaatttaagtgactagggtcaccctgctgaatccagatggccattctggccgaatttaagtgactagggtcacgtgaccctagtcacttaccggattctggccgtaccgagctcgaattcggcccaacttttctatacaaagttgaggtacgagatccgcccatccggccggccagatcctgcaggagatccaagcttggcgcgccgcggacctgaattccagcacactggcggccgttactagtaacggccgccagtgtgctggaattcgcccttcccaagctttgctctagatcaaactcacatccaaacataacatggatatcttccttaccaatcatactaattattttgggttaaatattaatcattatttttaagatattaattaagaaattaaaagattttttaaaaaaatgtataaaattatattattcatgatttttcatacatttgattttgataataaatatattttttttaatttcttaaaaaatgttgcaagacacttattagacatagtcttgttctgtttacaaaagcattcatcatttaatacattaaaaaatatttaatactaacagtagaatcttcttgtgagtggtgtgggagtaggcaacctggcattgaaacgagagaaagagagtcagaaccagaagacaaataaaaagtatgcaacaaacaaatcaaaatcaaagggcaaaggctggggttggctcaattggttgctacattcaattttcaactcagtcaacggttgagattcactctgacttccccaatctaagccgcggatgcaaacggttgaatctaacccacaatccaatctcgttacttaggggcttttccgtcattaactcacccctgccacccggtttccctataaattggaactcaatgctcccctctaaactcgtatcgcttcagagttgagaccaagacacactcgttcatatatctctctgctcttctcttctcttctacctctcaaggtacttttcttctccctctaccaaatcctagattccgtggttcaatttcggatcttgcacttctggtttgctttgccttgctttttcctcaactgggtccatctaggatccatgtgaaactctactctttctttaatatctgcggaatacgcgtttgactttcagatctagtcgaaatcatttcataattgcctttctttcttttagcttatgagaaataaaatcactttttttttatttcaaaataaaccttgggccttgtgctgactgagatggggtttggtgattacagaattttagcgaattttgtaattgtacttgtttgtctgtagttttgttttgttttcttgtttctcatacattccttaggcttcaattttattcgagtataggtcacaataggaattcaaactttgagcaggggaattaatcccttccttcaaatccagtttgtttgtatatatgtttaaaaaatgaaacttttgctttaaattctattataactttttttatggctgaaatttttgcatgtgtctttgctctctgttgtaaatttactgtttaggtactaactctaggcttgttgtgcagtttttgaagtataacaacagaagttcctattccgaagttcctattctctagaaagtataggaacttccaccacacaacacaatggcggccaccgcttccagaaccacccgattctcttcttcctcttcacaccccaccttccccaaacgcattactagatccaccctccctctctctcatcaaaccctcaccaaacccaaccacgctctcaaaatcaaatgttccatctccaaaccccccacggcggcgcccttcaccaaggaagcgccgaccacggagcccttcgtgtcacggttcgcctccggcgaacctcgcaagggcgcggacatccttgtggaggcgctggagaggcagggcgtgacgacggtgttcgcgtaccccggcggtgcgtcgatggagatccaccaggcgctcacgcgctccgccgccatccgcaacgtgctcccgcgccacgagcagggcggcgtcttcgccgccgaaggctacgcgcgttcctccggcctccccggcgtctgcattgccacctccggccccggcgccaccaacctcgtgagcggcctcgccgacgctttaatggacagcgtcccagtcgtcgccatcaccggccaggtcgcccgccggatgatcggcaccgacgccttccaagaaaccccgatcgtggaggtgagcagatccatcacgaagcacaactacctcatcctcgacgtcgacgacatcccccgcgtcgtcgccgaggctttcttcgtcgccacctccggccgccccggtccggtcctcatcgacattcccaaagacgttcagcagcaactcgccgtgcctaattgggacgagcccgttaacctccccggttacctcgccaggctgcccaggccccccgccgaggcccaattggaacacattgtcagactcatcatggaggcccaaaagcccgttctctacgtcggcggtggcagtttgaattccagtgctgaattgaggcgctttgttgaactcactggtattcccgttgctagcactttaatgggtcttggaacttttcctattggtgatgaatattcccttcagatgctgggtatgcatggtactgtttatgctaactatgctgttgacaatagtgatttgttgcttgcctttggggtaaggtttgatgaccgtgttactgggaagcttgaggcttttgctagtagggctaagattgttcacattgatattgattctgccgagattgggaagaacaagcaggcgcacgtgtcggtttgcgcggatttgaagttggccttgaagggaattaatatgattttggaggagaaaggagtggagggtaagtttgatcttggaggttggagagaagagattaatgtgcagaaacacaagtttccattgggttacaagacattccaggacgcgatttctccgcagcatgctatcgaggttcttgatgagttgactaatggagatgctattgttagtactggggttgggcagcatcaaatgtgggctgcgcagttttacaagtacaagagaccgaggcagtggttgacctcagggggtcttggagccatgggttttggattgcctgcggctattggtgctgctgttgctaaccctggggctgttgtggttgacattgatggggatggtagtttcatcatgaatgttcaggagttggccactataagagtggagaatctcccagttaagatattgttgttgaacaatcagcatttgggtatggtggttcagttggaggataggttctacaagtccaatagagctcacacctatcttggagatccgtctagcgagagcgagatattcccaaacatgctcaagtttgctgatgcttgtgggataccggcagcgcgagtgacgaagaaggaagagcttagagcggcaattcagagaatgttggacacccctggcccctaccttcttgatgtcattgtgccccatcaggagcatgtgttgccgatgattcccagtaatggatccttcaaggatgtgataactgagggtgatggtagaacgaggtactgattgcctagaccaaatgttccttgatgcttgttttgtacaatatatataagataatgctgtcctagttgcaggatttggcctgtggtgagcatcatagtctgtagtagttttggtagcaagacattttattttccttttatttaacttactacatgcagtagcatctatctatctctgtagtctgatatctcctgttgtctgtattgtgccgttggattttttgctgtagtgagactgaaaatgatgtgctagtaataatatttctgttagaaatctaagtagagaatctgttgaagaagtcaaaagctaatggaatcaggttacatattcaatgtttttctttttttagcggttggtagacgtgtagattcaacttctcttggagctcacctaggcaatcagtaaaatgcatattccttttttaacttgccatttatttacttttagtggaaattgtgaccaatttgttcatgtagaacggatttggaccattgcgtccacaaaacgtctcttttgctcgatcttcacaaagcgataccgaaatccagagatagttttcaaaagtcagaaatggcaaagttataaatagtaaaacagaatagatgctgtaatcgacttcaataacaagtggcatcacgtttctagttctagacccatcagctgaggtacaaattaattaataagtgactagggtcacgtgaccctagtcacttatgattccgatgacttcgtaggttcctagctcaagccgctcgtgtccaagcgtcacttacgattagctaatgattacggcatctaggaccgactagttcttatgtgcttctagtctccaaatgtggttgatagttattttgctctaagatcaacagtaatgaagtataaatcatcgttgtggtgtgctactcggttaattgagcattaacacacacaaacatgacgaggatggtataatctccaaaaatgtgtactttgttaggtgggaccctatagccttgattaatgtgctatgttaggcatgcctggaaacgtgtgacgcatatgttttgtgaacctgttgatattatatgtgcttttatattaccatattttattaaaatactaatatttattactagtaagatataacattctatctagcttaaaaactaaccataaatattccataataactagatttaccaaactaatatactaaatatacataataaatacaaaattaacaagacaataatcaatatttatgagcttaatatatttagacattatggttggtcgacgataatcatgctaacttttcgtaattgcttgattgaaatatgcttagaataatgcctctttgttctacatggcaaatagggaccattatggtgtaacaccctgggaaccacaaacaccccgaaatgctactaaactacacaactaaccttcatatataaaatttcgacagcatctcctttgaaaatttgcatagacgtggaagcaacagagtataaacagatctagctagctaagtttaaacggccggccatttacaattgaatatatcctgcca

SEQ ID NO: 114 - DNA, 14348 bp, Artificial Sequence
  PHP80736 T-DNA
aattacaacggtatatatcctgtcagccaacaccaaaacatcaaaaaaatcgggatcaggatcaggatctgcggccgcatcctgcaggtttaaacggccggccttcactagctagctgctaagctcaaacgagcaggaagcaacgagagggtggcgcgcgaccgacgtgcgtacgtagcatgagcctgagtggagacgttggacgtgtatgtatatacctctctgcgtgttaactatgtacgtaagcggcaggcagtgcaataagtgtggctctgtagtatgtacgtgcgggtacgatgctgtaagctactgaggcaagtccataaataaataatgacacgtgcgtgttctataatctcttcgcttcttcatttgtccccttgcggagtttggcatccattgatgccgttacgctgagaacagacacagcagacgaaccaaaagtgagttcttgtatgaaactatgacccttcatcgctaggctcaaacagcaccccgtacgaacacagcaaattagtcatctaactattagcccctacatgtttcagacgatacataaatatagcccatccttagcaattagctattggccctgcccatcccaagcaatgatctcgaagtatttttaatatatagtatttttaatatgtagcttttaaaattagaagataattttgagacaaaaatctccaagtatttttttgggtattttttactgcctccgtttttctttatttctcgtcacctagtttaattttgtgctaatcggctataaacgaaacagagagaaaagttactctaaaagcaactccaacagattagatataaatcttatatcctgcctagagctgttaaaaagatagacaactttagtggattagtgtatgcaacaaactctccaaatttaagtatcccaactacccaacgcatatcgttcccttttcattggcgcacgaactttcacctgctatagccgacgtacatgttcgttttttttgggcggcgcttactttcttccccgttcgttctcagcatcgcaactcaatttgttatggcggagaagcccttgtatcccaggtagtaatgcacagatatgcattattattattcataaaatcgagctagttaccctatgaggtgacatgaagcgctcacggttactatgacggttagcttcacgactgttggtggcagtagcgtacgacttagctatagttccggacttacctaactgactagagtcacacttagctgaccctagtcacttaggcgcgccgtcgacggatccgtaccatcaactttgtataataaagttgcccgcggccgccggtacctctgttaatgaacgtaaggagcttctggatgacggctgggacttctttgacaaagagacagagctctaagtgtcttcttttcagtagattatcggtgctagaataaaagagatatgaagggattctgggttctgctctatgtagagtaaagcttggatctttgatctaatctaccgttagtataaaacatctattgagctctcttttatttttcttctcagtgtatagtttgcttattgtttttttggtgtttttttccacctctttgtggtactgacataaacaaagactatcgttttgtcatagaattttgagattttgaagaaaagttggataatttagtatactttttaactgactttataaaacgaattagcttcaattagagcttcacaattctcggattttactgaatgacaagttaacaatttaagctagaaaaaaatatgctctaagcctggacatgttgttagtcatggccagcgtatgtgtacattaggtaaatgaaaacaaaaacaaaaactttgaaggtttctgttaagaaaggaactaatttagcaataagagacatgatattacaagctcaacactgtcgctatatctaccagaagccaacaaatcttccagtgcgtaccattggagccacttttcaggctcattagacaaaagtagcacatataatgtaaagacgaaacgatgataaagagactcacaaggacataatttcaatacagaagaagtttgatgtcattactcattagaaagaaaggtataacacaggaacggaaacatagttgaacaattattcatcaggggctttacaaggccccaaaacacaaaccaccaaagttttaaatgaaacgagacatgaacttcttctgattcataacagagataagtttcctaggtcccaatctagttcagtctcaattccagggaagcgcatggtctgacctcggactgtccatacttccagatagcgccagatcctccgttgatgtggtcctcaccgtgcattggaaagagagggagagtccttctgtgttccaagtaagcatcacctccgcattcctcttcttcttggtgtccctccaagccgaagagaggtttagccctatcgaagaagttgtagggagcggaggagtagtggtgatccatgtttgcccatccgcctccaacgttgttgtagttcatggagcaatcttgctccatagagccgtacacgtgggaagacatgtagccgttggaggcgttgacaactccacattcggttccagaggaggcatggttgagattcccgttgttgaaagaggggtagggcttgttgtggtggtagaggtgatggtcctggttcaacttcacgttgacggagtttgcgggtctttgcataggaactccgtggtggtgatgaagcaaaggatggtagtggtcgttggcggccatcataacagaattgggtgatgaggaaggagtggtcatgttagtcccgttgaaacgcttcttctgcctctcacgagccttgtggttctggaaccagtagaagacgttcttaccctcgatcttaccgaattgacgcaggcgagcggtgatcttctgaatctgatcagcagtaggggagcggatggcattgttgtagtacaactccttcaggatcttgatctgctcagtggtaggtgtccatctggtggaggtctgtctgcaagtgtaccctccggaaccggacttgttgttgttgttgttcccggactcttgatcggcctgatggtggtgatgttggtgctgaggaggctccatggggttattatgtgcactgcaatacaagtgtcgcaactagtttcagtgcatggaatgaggcattgcaaataaccaattatatatgcatgcatgtgcacaagtggaatatttgctccaccgaagattatgtagctaaccttccaacatgttttgttggcacctttcagttgtgttcacgtgcttcttgacgtagagacaagtagataaaactaccttcagttattaaccttttattttatcagccttcagttattaatttattataggcatgtcacatatggtatctatatattttgtacaaaaaaaaaaacaaaaaagtggttgctggatagcaataaaaattcaattttttacacctttgaatgattagtaggctgtcacttgaaaaatatgggtactgcaaaaaataataaaaatgtgaattgttcaaagtggggaaggaatggccttggtagtgtgaagcagctaaactaaaagtcttcaaccgactgttaaaaaatgagaaacgtgaataatagcatcatacattttaaaaaaacatgtttttagtaaaatataaaagttttttacaccattgtctaataaatcattatttataataaatttgttaaattttaaaatcatcatctataataaactgtatattttcaattgattgataatgtataaataaggtcagaattgttgcacaagaagtgcaagcaacaatgctgcaaaaactttcaacttaacaatatatatttattaaactctttacaatttatataatgttcagttaataataaataatgtgtaaacattttattggtatttctcttttagcaagcatatatcatcattgttttcacgaattgtcacctttcgtaggcaatcaaccatcatcattttctccatgtcggttgtgtttaattggaggggcatacggtacgtcgtctttttcatttaataggaaaaattgggtgtattataataatgcttgtgacgccaacatgttaatagaatgtatgaatgttacctgagctgagtcattgcttgtgcatgtgtaagcattgttagacattgcaatggagagtgggatggttatgagtattgtctctcaatctcttattctaacttctcaatatatcttcatattcgtattcgatatcgggtttaaatttattttctcattcctgtacctatccggtatccccgaccctgtcccatacacgatttaaattaaaaaaatatttttttttataaaaaaaatattaaaagtttgattttagaaaaagaaagttaattgttaaacatttgttttaactacttatatattaataaatttattatagcgcatgtgtctacaaaaatagttaagaaaataatattaaattatgtaaaaattctaaaataaaattaactagtaataaaaattttatgccttttgattaaattatgcaaaaaaatttaaagattttaagtggcagggcgagttcgggtttggggtcgggacgagtctagtaacctcatacccatacccgtatctgacttttgattatcgagaaaaatccaaacccgaacctataccaggtcaactcaggtattacccgtcaaagtcgaaacgaattcagacggatacccacaagtatgagttttcttgccatatctaagcattgttattaccaaaaacaaattaattgtgttaatactggctaacacattacagacaaaaaaaatattgaattattttaacaagttaatattctttaaacttccaagatattaacttatgacatagtagtaacaaaaatatttttaaattttttttctcaaataagagatattttccctcgtttatttcagataaaaaagtatatttatattgttcatgagtttaattttcgtgcatggtgttttgtgagagttaaaattttatactattaaccaataaaaaaatctatgtataacttttaaaataattattttaaaaaatttaacaaatagagcatatataataattcatcccgggccattctggcccactttgtacaagaaagctgggtctagatatctcgagtgcggccgcgaattcggtaccggatccagtcgactgaattggttccggcgccagcctgcttttttgtacaaacttgaagcttcggccggggccgcattcgcaaaacacacctagactagatttgttttgctaacccaattcgagctcggtacctcgcgaatgcatctagatatcggatcccggggttaaccttcagcttagaaatgatgtgttttctacacttttctcttcttttttttcttttcatctcacatgaatcaaaaagagaaagcttaattacattaaaggttgatgtgatatttactttctaaatatttgctagaagaaattataatgataacattaaattaagttatagtcatttctatttcggttgtctcccactttctgctatgcttttacaacaacagttcaagatttggaatcgttttctttctccaccaatcgtagtaatacttctttttgtgtttgttgaaattttgcaagattctctcttcctctggttaatacacataacttacttggtaagcttggctgcattttcttttcaagcttttaatcaaagactcactagaaattgcaaaggcaaacataaaattatgtgatcaaactcctactgtgagtttttggttacaaacaaaagttaaaaacaaaagcttgatatttaaaagataaactcaacacatatgcatttgactggcgcacagaagacaattcaagacttgggaaaacagtgagccatcaaaatcgtcagataattcagggaatatattgaatgtggagatgtggtaatcacactattgcacacaaagagtggcaaacaagcggcgcccttggtttggtatagtaagagacaattgttttggactgtttgtgttgccatattcacaaaaatactattgagctatgtatgttaaacattatggtcaatgagtagtagtgaacattcaagtttttttttttttccacttcaagtttttcatcttattattatttttcgttgtgatgcagtagtacggcccatcttcaccagtagtatatcaaagccgaaacagatgacaaattgtttaacatgcacttggattattattgagagttgaaatacaaaggcccgttacaagcccaaacgaaggtacataaaagaaaagcagaaaatgaaaacgaaatcgatagggataagtttttccaactgacggaaacacaaactacaccaggtgaaatagatcacctcccaagtgcatgagacacgaaccaaccacttatcatcagatcacaaaagagctcaaagatctagcgatcgcctaattcagtttgtggccaagctttgatggcaagtcgcaatatctagcgacggccacctcgtgctgctccacataagtctccttgtcggcctcttttatgcgctcgagtctatggtccacgtaatacacgccgggcattttcaagtttttggcaggctttttggagcggtaggtggtcttgaagttacagatgagatggcctccgccgacaagcttcaaggccatgtcggatctaccttcaagaccaccgtcggctgggtaaagcatttcagtattggcttcccagccgagagtcttcttctgcatcacgggaccgtttgatgggaagttcacgccgcggatcttgacgttgtagatcaagcagccgtcttgaagactagtgtcttgggtggcggtcaagactcctccgtcttcgtaggtggtcactctctcccaggtgaatccctctgggaatgactgtttgaagaagtctgggatgccctgggtgtggttgatgaaggttctactcccgtacatgaaggaggtggctagtatgtcgaaggcgaatgggagtggacctccttcgaccaccttgattctcatagtctgggttccctcatagggcttgccctcaccctcagaggtacacttgaagtggtgattattcacggtgccctccatgtataacttcatgtgcatgttctctttaatgagctcctcccccttggacaccatggctgtagagtcaacaatcacaagataaatcagaatcaaaatccatcacgtaatttcaagaagcaatttcgtgaaaaaaaatcctaatctatggccacagaatcaacaaataaggtagttgctaaaggacctgagcaatatctcttgaaataccatacagaatcaacgaataaggcttttatcaacggatctgaacaatttcttgaaaaacgactgaagtatcaacaaataaggctgttgtttaacggatctgaagtagttcatgaaaaaaaccttaatctacgactacagaatcaacaattaaggcttgttgtaaacggatctgaaaatctttatgaaaaaaactctaattagacctaatttacggttataaaatcatcaattaaggacgttcttgcattaataaaagctgaatcttctgattatgaaaatttataatcgatgaaacgatagaaaacacaatcaaatcaacatcatgctgatgtagaacaaacaataaagaagaagaaaaaaaaacggaagaaatctacgaaccttgaaaggagaggtagggaactgcgcaaagagaatgaactaatttgattgcaattgaagtgcgattagggtcgaggggtgtgggggcattttatagcatatgcggtggaaccgttctccaatcatattgtgacgcgtgcccatgtatggtgtgacttggtgtttatgacacagatgatatttcggggagtccttcgtagttgacggtttcgtaatcttgacggagtcagagatgtaccttcaccgcttcacgcttggctttatccgttaccacggcgttattaaattgggcccgcacccgttgcaagttaggaccacagtgtccattacctgaacggtcggctgctaccagtattttacattattaaaatctatggaaaagctgtcacgctagatttttttttttttttttatggataagaaaagactaataggaaagctttcttactccactaaagtctttaataattattttttcaattttcaaataaaatcataatcatcccactaaattctttctcatttgtttttcactttgtaagatattcttccgtagatttttataagtaattctttaagatacatagcataataaattgtatacttttagttacagtctatataaaattagtcatttaaaaaatatagccttaatgatttttttaaaatgaagttatttttttctaatttttctttcttatttattatcgaatgattttttctactaatcgtttagggaagagttttatttttctaatgacgagatgtgttaaatgatgcaacttgaaggcgacatattttttaccaataaaataaaactaaaagatagcttgttgacaaaaacaataattgatgttaaagaaaacgtaagggcaatgggtatcatctaattgttggacaagttgtcttctaaggctaggtaagcttttgttttttattagctgaaatatttatttaattgttctataaataaattttttaaaatgatttttaatgtttttaaatattatttaaaataatttttttaaaattttaacattttagtttttaattattttttatcttacttaaattaattataatttattattttctaccattttatactttccaattaattttatcgaagcattaataccatctggtattttgtcactgcttcgtatgattgtttattaaattttagcttctttcacattggagatgctgggcggtgtgagttacagcatggtgtgaagttaaggtggtttgattatggaacccgaaggtgttggtgcaaggtggataaaattgcttgccaggagatacataaaatgatttacaaaatgaaataaagaataaataaatagtcaagttcaaatttaaatcaaggattagaattatttttccgtacatgatgtaaccgcaatcaccccctgctgaatccagatggccattctggccgaatttaagtgactagggtcaccctgctgaatccagatggccattctggccgaatttaagtgactagggtcacgtgaccctagtcacttaccggattctggccgtaccgagctcgaattcggcccaacttttctatacaaagttgaggtacgagatccgcccatccggccggccagatcctgcaggagatccaagcttggcgcgccgcggacctgaattccagcacactggcggccgttactagtaacggccgccagtgtgctggaattcgcccttcccaagctttgctctagatcaaactcacatccaaacataacatggatatcttccttaccaatcatactaattattttgggttaaatattaatcattatttttaagatattaattaagaaattaaaagattttttaaaaaaatgtataaaattatattattcatgatttttcatacatttgattttgataataaatatattttttttaatttcttaaaaaatgttgcaagacacttattagacatagtcttgttctgtttacaaaagcattcatcatttaatacattaaaaaatatttaatactaacagtagaatcttcttgtgagtggtgtgggagtaggcaacctggcattgaaacgagagaaagagagtcagaaccagaagacaaataaaaagtatgcaacaaacaaatcaaaatcaaagggcaaaggctggggttggctcaattggttgctacattcaattttcaactcagtcaacggttgagattcactctgacttccccaatctaagccgcggatgcaaacggttgaatctaacccacaatccaatctcgttacttaggggcttttccgtcattaactcacccctgccacccggtttccctataaattggaactcaatgctcccctctaaactcgtatcgcttcagagttgagaccaagacacactcgttcatatatctctctgctcttctcttctcttctacctctcaaggtacttttcttctccctctaccaaatcctagattccgtggttcaatttcggatcttgcacttctggtttgctttgccttgctttttcctcaactgggtccatctaggatccatgtgaaactctactctttctttaatatctgcggaatacgcgtttgactttcagatctagtcgaaatcatttcataattgcctttctttcttttagcttatgagaaataaaatcactttttttttatttcaaaataaaccttgggccttgtgctgactgagatggggtttggtgattacagaattttagcgaattttgtaattgtacttgtttgtctgtagttttgttttgttttcttgtttctcatacattccttaggcttcaattttattcgagtataggtcacaataggaattcaaactttgagcaggggaattaatcccttccttcaaatccagtttgtttgtatatatgtttaaaaaatgaaacttttgctttaaattctattataactttttttatggctgaaatttttgcatgtgtctttgctctctgttgtaaatttactgtttaggtactaactctaggcttgttgtgcagtttttgaagtataacaacagaagttcctattccgaagttcctattctctagaaagtataggaacttccaccacacaacacaatggcggccaccgcttccagaaccacccgattctcttcttcctcttcacaccccaccttccccaaacgcattactagatccaccctccctctctctcatcaaaccctcaccaaacccaaccacgctctcaaaatcaaatgttccatctccaaaccccccacggcggcgcccttcaccaaggaagcgccgaccacggagcccttcgtgtcacggttcgcctccggcgaacctcgcaagggcgcggacatccttgtggaggcgctggagaggcagggcgtgacgacggtgttcgcgtaccccggcggtgcgtcgatggagatccaccaggcgctcacgcgctccgccgccatccgcaacgtgctcccgcgccacgagcagggcggcgtcttcgccgccgaaggctacgcgcgttcctccggcctccccggcgtctgcattgccacctccggccccggcgccaccaacctcgtgagcggcctcgccgacgctttaatggacagcgtcccagtcgtcgccatcaccggccaggtcgcccgccggatgatcggcaccgacgccttccaagaaaccccgatcgtggaggtgagcagatccatcacgaagcacaactacctcatcctcgacgtcgacgacatcccccgcgtcgtcgccgaggctttcttcgtcgccacctccggccgccccggtccggtcctcatcgacattcccaaagacgttcagcagcaactcgccgtgcctaattgggacgagcccgttaacctccccggttacctcgccaggctgcccaggccccccgccgaggcccaattggaacacattgtcagactcatcatggaggcccaaaagcccgttctctacgtcggcggtggcagtttgaattccagtgctgaattgaggcgctttgttgaactcactggtattcccgttgctagcactttaatgggtcttggaacttttcctattggtgatgaatattcccttcagatgctgggtatgcatggtactgtttatgctaactatgctgttgacaatagtgatttgttgcttgcctttggggtaaggtttgatgaccgtgttactgggaagcttgaggcttttgctagtagggctaagattgttcacattgatattgattctgccgagattgggaagaacaagcaggcgcacgtgtcggtttgcgcggatttgaagttggccttgaagggaattaatatgattttggaggagaaaggagtggagggtaagtttgatcttggaggttggagagaagagattaatgtgcagaaacacaagtttccattgggttacaagacattccaggacgcgatttctccgcagcatgctatcgaggttcttgatgagttgactaatggagatgctattgttagtactggggttgggcagcatcaaatgtgggctgcgcagttttacaagtacaagagaccgaggcagtggttgacctcagggggtcttggagccatgggttttggattgcctgcggctattggtgctgctgttgctaaccctggggctgttgtggttgacattgatggggatggtagtttcatcatgaatgttcaggagttggccactataagagtggagaatctcccagttaagatattgttgttgaacaatcagcatttgggtatggtggttcagttggaggataggttctacaagtccaatagagctcacacctatcttggagatccgtctagcgagagcgagatattcccaaacatgctcaagtttgctgatgcttgtgggataccggcagcgcgagtgacgaagaaggaagagcttagagcggcaattcagagaatgttggacacccctggcccctaccttcttgatgtcattgtgccccatcaggagcatgtgttgccgatgattcccagtaatggatccttcaaggatgtgataactgagggtgatggtagaacgaggtactgattgcctagaccaaatgttccttgatgcttgttttgtacaatatatataagataatgctgtcctagttgcaggatttggcctgtggtgagcatcatagtctgtagtagttttggtagcaagacattttattttccttttatttaacttactacatgcagtagcatctatctatctctgtagtctgatatctcctgttgtctgtattgtgccgttggattttttgctgtagtgagactgaaaatgatgtgctagtaataatatttctgttagaaatctaagtagagaatctgttgaagaagtcaaaagctaatggaatcaggttacatattcaatgtttttctttttttagcggttggtagacgtgtagattcaacttctcttggagctcacctaggcaatcagtaaaatgcatattccttttttaacttgccatttatttacttttagtggaaattgtgaccaatttgttcatgtagaacggatttggaccattgcgtccacaaaacgtctcttttgctcgatcttcacaaagcgataccgaaatccagagatagttttcaaaagtcagaaatggcaaagttataaatagtaaaacagaatagatgctgtaatcgacttcaataacaagtggcatcacgtttctagttctagacccatcagctgaggtacaaattaattaataagtgactagggtcacgtgaccctagtcacttatgattccgatgacttcgtaggttcctagctcaagccgctcgtgtccaagcgtcacttacgattagctaatgattacggcatctaggaccgactagttcttatgtgcttctagtctccaaatgtggttgatagttattttgctctaagatcaacagtaatgaagtataaatcatcgttgtggtgtgctactcggttaattgagcattaacacacacaaacatgacgaggatggtataatctccaaaaatgtgtactttgttaggtgggaccctatagccttgattaatgtgctatgttaggcatgcctggaaacgtgtgacgcatatgttttgtgaacctgttgatattatatgtgcttttatattaccatattttattaaaatactaatatttattactagtaagatataacattctatctagcttaaaaactaaccataaatattccataataactagatttaccaaactaatatactaaatatacataataaatacaaaattaacaagacaataatcaatatttatgagcttaatatatttagacattatggttggtcgacgataatcatgctaacttttcgtaattgcttgattgaaatatgcttagaataatgcctctttgttctacatggcaaatagggaccattatggtgtaacaccctgggaaccacaaacaccccgaaatgctactaaactacacaactaaccttcatatataaaatttcgacagcatctcctttgaaaatttgcatagacgtggaagcaacagagtataaacagatctagctagctaagtttaaacggccggccatttacaattgaatatatcctgcca

SEQ ID NO: 115 - DNA, 14157 bp, Artificial Sequence
  PHP81060 T-DNA
aattacaacggtatatatcctgtcagccaacaccaaaacatcaaaaaaatcgggatcaggatcaggatctgcggccgcatcctgcaggtttaaacggccggccttcactagctagctgctaagctcaaacgagcaggaagcaacgagagggtggcgcgcgaccgacgtgcgtacgtagcatgagcctgagtggagacgttggacgtgtatgtatatacctctctgcgtgttaactatgtacgtaagcggcaggcagtgcaataagtgtggctctgtagtatgtacgtgcgggtacgatgctgtaagctactgaggcaagtccataaataaataatgacacgtgcgtgttctataatctcttcgcttcttcatttgtccccttgcggagtttggcatccattgatgccgttacgctgagaacagacacagcagacgaaccaaaagtgagttcttgtatgaaactatgacccttcatcgctaggctcaaacagcaccccgtacgaacacagcaaattagtcatctaactattagcccctacatgtttcagacgatacataaatatagcccatccttagcaattagctattggccctgcccatcccaagcaatgatctcgaagtatttttaatatatagtatttttaatatgtagcttttaaaattagaagataattttgagacaaaaatctccaagtatttttttgggtattttttactgcctccgtttttctttatttctcgtcacctagtttaattttgtgctaatcggctataaacgaaacagagagaaaagttactctaaaagcaactccaacagattagatataaatcttatatcctgcctagagctgttaaaaagatagacaactttagtggattagtgtatgcaacaaactctccaaatttaagtatcccaactacccaacgcatatcgttcccttttcattggcgcacgaactttcacctgctatagccgacgtacatgttcgttttttttgggcggcgcttactttcttccccgttcgttctcagcatcgcaactcaatttgttatggcggagaagcccttgtatcccaggtagtaatgcacagatatgcattattattattcataaaatcgagctagttaccctatgaggtgacatgaagcgctcacggttactatgacggttagcttcacgactgttggtggcagtagcgtacgacttagctatagttccggacttacctaactgactagagtcacacttagctgaccctagtcacttaggcgcgccgtcgacggatccgtaccatcaactttgtataataaagttgcccgcggccgccggtacctctgttaatgaacgtaaggagcttctggatgacggctgggacttctttgacaaagagacagagctctaagtgtcttcttttcagtagattatcggtgctagaataaaagagatatgaagggattctgggttctgctctatgtagagtaaagcttggatctttgatctaatctaccgttagtataaaacatctattgagctctcttttatttttcttctcagtgtatagtttgcttattgtttttttggtgtttttttccacctctttgtggtactgacataaacaaagactatcgttttgtcatagaattttgagattttgaagaaaagttggataatttagtatactttttaactgactttataaaacgaattagcttcaattagagcttcacaattctcggattttactgaatgacaagttaacaatttaagctagaaaaaaatatgctctaagcctggacatgttgttagtcatggccagcgtatgtgtacattaggtaaatgaaaacaaaaacaaaaactttgaaggtttctgttaagaaaggaactaatttagcaataagagacatgatattacaagctcaacactgtcgctatatctaccagaagccaacaaatcttccagtgcgtaccattggagccacttttcaggctcattagacaaaagtagcacatataatgtaaagacgaaacgatgataaagagactcacaaggacataatttcaatacagaagaagtttgatgtcattactcattagaaagaaaggtataacacaggaacggaaacatagttgaacaattattcatcaggggctttacaaggccccaaaacacaaaccaccaaagttttaaatgaaacgagacatgaacttcttctgattcataacagagataagtttcctaggtcccaatctagttcagtctcaattccagggaagcgcatggtctgacctcggactgtccatacttccagatagcgccagatcctccgttgatgtggtcctcaccgtgcattggaaagagagggagagtccttctgtgttccaagtaagcatcacctccgcattcctcttcttcttggtgtccctccaagccgaagagaggtttagccctatcgaagaagttgtagggagcggaggagtagtggtgatccatgtttgcccatccgcctccaacgttgttgtagttcatggagcaatcttgctccatagagccgtacacgtgggaagacatgtagccgttggaggcgttgacaactccacattcggttccagaggaggcatggttgagattcccgttgttgaaagaggggtagggcttgttgtggtggtagaggtgatggtcctggttcaacttcacgttgacggagtttgcgggtctttgcataggaactccgtggtggtgatgaagcaaaggatggtagtggtcgttggcggccatcataacagaattgggtgatgaggaaggagtggtcatgttagtcccgttgaaacgcttcttctgcctctcacgagccttgtggttctggaaccagtagaagacgttcttaccctcgatcttaccgaattgacgcaggcgagcggtgatcttctgaatctgatcagcagtaggggagcggatggcattgttgtagtacaactccttcaggatcttgatctgctcagtggtaggtgtccatctggtggaggtctgtctgcaagtgtaccctccggaaccggacttgttgttgttgttgttcccggactcttgatcggcctgatggtggtgatgttggtgctgaggaggctccatgggttttcactctctcacacacttcaaaggataaaatgaaacttactttatagacagttttttaatcctccctcaggagagaagcttcttaaataataacattaatctttcagttacttaatctaacaaatcgtttcgttcgagtattgtaaattgaaggtgagcacgtgatggtgttaggtggtgtgtattgttaccaacgactcaacatcaacaagtcttgggggtgaacaaaaaagcctttcacctttcattaatatcctacacactattactattttctatcgataagtatctgtgttttaatttaaaatttataaatatatattaattttattttataaaataaaatatttattttaaattttcttaagattttattttaatgagtcaactggtctattacgtttgttttaataactataggttgaatacaatgatcatatttttgtttgctgcacaaggtgatctatctctctctctctctctatatatatatatatttcttgttctctaaaaaagaacaacacaagcacataactcctttctcccaaatatcttctttttcttttcctataaaaacttattttttagagcaaaagcattagtgttcacaagtttcgggattcttttgctgcacacgtcggtcgaaaccaactggttgtcgtatcttaggagagggatcattttgctacacacggtcaaaatcaactagtgcttcaacccaggctaaataattatttttcttatttattttttccttatatttattgtatgatatagtcatgtggtgttaattaaaattattttgctattaatatttttttatttaattcaagactttgcattctcttctcatttatttcttttcttttattttaatttttttcaacattttcttcacaattaaacatgtcagactgaattaaaattttgcacctcatctacaccgtctatctaacattcaatcgcacaacagaatcacgtatgaataggaaaataaatggagataatctagaaatatcattattattattgtctaagagctaattacaaaagagaagaaattggccacattaaaattaacttctgggaaggtccatttaatatccaaaaattattcgataacaaaagtaggacaagtgagaaatgttgaagtaaacaaaaaaatttagatagagtcatatctaaatgttggctaagtaagcgtgagtaattatgaacccgtgaaccatccacatgggagtggtgaaggaaggaccacaatatatgagattttcctgcccttgaaagaagaagtagaaaaaaaagaagaaatatacacttaaaaaaatccttttgtaatgaatcatttattaagaaaaataaataaacttaacacaaacccgaaaaagatataataataacctccagatcatctaccattatacatacaaataataaattaaatgacttttcaatggtatttgttactcaaaaagaaaaagaccaataactattggtacacctggtgacccaactaattagtcaaatgaggattatttcctatgaatatcatgatgaagaagaaaaaaagacatgaagagtcatttaatttatgtatgtttactattccatgacaataatgttcaattaatccttttttttattaccaccatgtcttatttcatggacaagctactccggtcaaagaaattttgggtaatggttattctctgaaataataaataaactgttgcatcgtagtcctccacttccaaagatatatgtgaacctcaaatgaaattatgaagattttcgtgaaaggttctttctctttttctagcaagaataaataaaaaaagtaacaattttacaaaattaatcttgtattaaatcttgtttgttatgcaaattgctaatgttagaagtataaatagaaaaaacaattaaaattaatttttacttcgagcacacacttattatgacatgaattctataacaagtgcaagaacatcgaagtcccgggccattctggcccactttgtacaagaaagctgggtgcccggggttaaccttcagcttagaaatgatgtgttttctacacttttctcttcttttttttcttttcatctcacatgaatcaaaaagagaaagcttaattacattaaaggttgatgtgatatttactttctaaatatttgctagaagaaattataatgataacattaaattaagttatagtcatttctatttcggttgtctcccactttctgctatgcttttacaacaacagttcaagatttggaatcgttttctttctccaccaatcgtagtaatacttctttttgtgtttgttgaaattttgcaagattctctcttcctctggttaatacacataacttacttggtaagcttggctgcattttcttttcaagcttttaatcaaagactcactagaaattgcaaaggcaaacataaaattatgtgatcaaactcctactgtgagtttttggttacaaacaaaagttaaaaacaaaagcttgatatttaaaagataaactcaacacatatgcatttgactggcgcacagaagacaattcaagacttgggaaaacagtgagccatcaaaatcgtcagataattcagggaatatattgaatgtggagatgtggtaatcacactattgcacacaaagagtggcaaacaagcggcgcccttggtttggtatagtaagagacaattgttttggactgtttgtgttgccatattcacaaaaatactattgagctatgtatgttaaacattatggtcaatgagtagtagtgaacattcaagtttttttttttttccacttcaagtttttcatcttattattatttttcgttgtgatgcagtagtacggcccatcttcaccagtagtatatcaaagccgaaacagatgacaaattgtttaacatgcacttggattattattgagagttgaaatacaaaggcccgttacaagcccaaacgaaggtacataaaagaaaagcagaaaatgaaaacgaaatcgatagggataagtttttccaactgacggaaacacaaactacaccaggtgaaatagatcacctcccaagtgcatgagacacgaaccaaccacttatcatcagatcacaaaagagctcaaagatctagcgatcgcctaattcagtttgtggccaagctttgatggcaagtcgcaatatctagcgacggccacctcgtgctgctccacataagtctccttgtcggcctcttttatgcgctcgagtctatggtccacgtaatacacgccgggcattttcaagtttttggcaggctttttggagcggtaggtggtcttgaagttacagatgagatggcctccgccgacaagcttcaaggccatgtcggatctaccttcaagaccaccgtcggctgggtaaagcatttcagtattggcttcccagccgagagtcttcttctgcatcacgggaccgtttgatgggaagttcacgccgcggatcttgacgttgtagatcaagcagccgtcttgaagactagtgtcttgggtggcggtcaagactcctccgtcttcgtaggtggtcactctctcccaggtgaatccctctgggaatgactgtttgaagaagtctgggatgccctgggtgtggttgatgaaggttctactcccgtacatgaaggaggtggctagtatgtcgaaggcgaatgggagtggacctccttcgaccaccttgattctcatagtctgggttccctcatagggcttgccctcaccctcagaggtacacttgaagtggtgattattcacggtgccctccatgtataacttcatgtgcatgttctctttaatgagctcctcccccttggacaccatggctgtagagtcaacaatcacaagataaatcagaatcaaaatccatcacgtaatttcaagaagcaatttcgtgaaaaaaaatcctaatctatggccacagaatcaacaaataaggtagttgctaaaggacctgagcaatatctcttgaaataccatacagaatcaacgaataaggcttttatcaacggatctgaacaatttcttgaaaaacgactgaagtatcaacaaataaggctgttgtttaacggatctgaagtagttcatgaaaaaaaccttaatctacgactacagaatcaacaattaaggcttgttgtaaacggatctgaaaatctttatgaaaaaaactctaattagacctaatttacggttataaaatcatcaattaaggacgttcttgcattaataaaagctgaatcttctgattatgaaaatttataatcgatgaaacgatagaaaacacaatcaaatcaacatcatgctgatgtagaacaaacaataaagaagaagaaaaaaaaacggaagaaatctacgaaccttgaaaggagaggtagggaactgcgcaaagagaatgaactaatttgattgcaattgaagtgcgattagggtcgaggggtgtgggggcattttatagcatatgcggtggaaccgttctccaatcatattgtgacgcgtgcccatgtatggtgtgacttggtgtttatgacacagatgatatttcggggagtccttcgtagttgacggtttcgtaatcttgacggagtcagagatgtaccttcaccgcttcacgcttggctttatccgttaccacggcgttattaaattgggcccgcacccgttgcaagttaggaccacagtgtccattacctgaacggtcggctgctaccagtattttacattattaaaatctatggaaaagctgtcacgctagatttttttttttttttttatggataagaaaagactaataggaaagctttcttactccactaaagtctttaataattattttttcaattttcaaataaaatcataatcatcccactaaattctttctcatttgtttttcactttgtaagatattcttccgtagatttttataagtaattctttaagatacatagcataataaattgtatacttttagttacagtctatataaaattagtcatttaaaaaatatagccttaatgatttttttaaaatgaagttatttttttctaatttttctttcttatttattatcgaatgattttttctactaatcgtttagggaagagttttatttttctaatgacgagatgtgttaaatgatgcaacttgaaggcgacatattttttaccaataaaataaaactaaaagatagcttgttgacaaaaacaataattgatgttaaagaaaacgtaagggcaatgggtatcatctaattgttggacaagttgtcttctaaggctaggtaagcttttgttttttattagctgaaatatttatttaattgttctataaataaattttttaaaatgatttttaatgtttttaaatattatttaaaataatttttttaaaattttaacattttagtttttaattattttttatcttacttaaattaattataatttattattttctaccattttatactttccaattaattttatcgaagcattaataccatctggtattttgtcactgcttcgtatgattgtttattaaattttagcttctttcacattggagatgctgggcggtgtgagttacagcatggtgtgaagttaaggtggtttgattatggaacccgaaggtgttggtgcaaggtggataaaattgcttgccaggagatacataaaatgatttacaaaatgaaataaagaataaataaatagtcaagttcaaatttaaatcaaggattagaattatttttccgtacatgatgtaaccgcaatcaccccctgctgaatccagatggccattctggccgaatttaagtgactagggtcaccctgctgaatccagatggccattctggccgaatttaagtgactagggtcacgtgaccctagtcacttaccggattctggccgtaccgagctcgaattcggcccaacttttctatacaaagttgaggtacgagatccgcccatccggccggccagatcctgcaggagatccaagcttggcgcgccgcggacctgaattccagcacactggcggccgttactagtaacggccgccagtgtgctggaattcgcccttcccaagctttgctctagatcaaactcacatccaaacataacatggatatcttccttaccaatcatactaattattttgggttaaatattaatcattatttttaagatattaattaagaaattaaaagattttttaaaaaaatgtataaaattatattattcatgatttttcatacatttgattttgataataaatatattttttttaatttcttaaaaaatgttgcaagacacttattagacatagtcttgttctgtttacaaaagcattcatcatttaatacattaaaaaatatttaatactaacagtagaatcttcttgtgagtggtgtgggagtaggcaacctggcattgaaacgagagaaagagagtcagaaccagaagacaaataaaaagtatgcaacaaacaaatcaaaatcaaagggcaaaggctggggttggctcaattggttgctacattcaattttcaactcagtcaacggttgagattcactctgacttccccaatctaagccgcggatgcaaacggttgaatctaacccacaatccaatctcgttacttaggggcttttccgtcattaactcacccctgccacccggtttccctataaattggaactcaatgctcccctctaaactcgtatcgcttcagagttgagaccaagacacactcgttcatatatctctctgctcttctcttctcttctacctctcaaggtacttttcttctccctctaccaaatcctagattccgtggttcaatttcggatcttgcacttctggtttgctttgccttgctttttcctcaactgggtccatctaggatccatgtgaaactctactctttctttaatatctgcggaatacgcgtttgactttcagatctagtcgaaatcatttcataattgcctttctttcttttagcttatgagaaataaaatcactttttttttatttcaaaataaaccttgggccttgtgctgactgagatggggtttggtgattacagaattttagcgaattttgtaattgtacttgtttgtctgtagttttgttttgttttcttgtttctcatacattccttaggcttcaattttattcgagtataggtcacaataggaattcaaactttgagcaggggaattaatcccttccttcaaatccagtttgtttgtatatatgtttaaaaaatgaaacttttgctttaaattctattataactttttttatggctgaaatttttgcatgtgtctttgctctctgttgtaaatttactgtttaggtactaactctaggcttgttgtgcagtttttgaagtataacaacagaagttcctattccgaagttcctattctctagaaagtataggaacttccaccacacaacacaatggcggccaccgcttccagaaccacccgattctcttcttcctcttcacaccccaccttccccaaacgcattactagatccaccctccctctctctcatcaaaccctcaccaaacccaaccacgctctcaaaatcaaatgttccatctccaaaccccccacggcggcgcccttcaccaaggaagcgccgaccacggagcccttcgtgtcacggttcgcctccggcgaacctcgcaagggcgcggacatccttgtggaggcgctggagaggcagggcgtgacgacggtgttcgcgtaccccggcggtgcgtcgatggagatccaccaggcgctcacgcgctccgccgccatccgcaacgtgctcccgcgccacgagcagggcggcgtcttcgccgccgaaggctacgcgcgttcctccggcctccccggcgtctgcattgccacctccggccccggcgccaccaacctcgtgagcggcctcgccgacgctttaatggacagcgtcccagtcgtcgccatcaccggccaggtcgcccgccggatgatcggcaccgacgccttccaagaaaccccgatcgtggaggtgagcagatccatcacgaagcacaactacctcatcctcgacgtcgacgacatcccccgcgtcgtcgccgaggctttcttcgtcgccacctccggccgccccggtccggtcctcatcgacattcccaaagacgttcagcagcaactcgccgtgcctaattgggacgagcccgttaacctccccggttacctcgccaggctgcccaggccccccgccgaggcccaattggaacacattgtcagactcatcatggaggcccaaaagcccgttctctacgtcggcggtggcagtttgaattccagtgctgaattgaggcgctttgttgaactcactggtattcccgttgctagcactttaatgggtcttggaacttttcctattggtgatgaatattcccttcagatgctgggtatgcatggtactgtttatgctaactatgctgttgacaatagtgatttgttgcttgcctttggggtaaggtttgatgaccgtgttactgggaagcttgaggcttttgctagtagggctaagattgttcacattgatattgattctgccgagattgggaagaacaagcaggcgcacgtgtcggtttgcgcggatttgaagttggccttgaagggaattaatatgattttggaggagaaaggagtggagggtaagtttgatcttggaggttggagagaagagattaatgtgcagaaacacaagtttccattgggttacaagacattccaggacgcgatttctccgcagcatgctatcgaggttcttgatgagttgactaatggagatgctattgttagtactggggttgggcagcatcaaatgtgggctgcgcagttttacaagtacaagagaccgaggcagtggttgacctcagggggtcttggagccatgggttttggattgcctgcggctattggtgctgctgttgctaaccctggggctgttgtggttgacattgatggggatggtagtttcatcatgaatgttcaggagttggccactataagagtggagaatctcccagttaagatattgttgttgaacaatcagcatttgggtatggtggttcagttggaggataggttctacaagtccaatagagctcacacctatcttggagatccgtctagcgagagcgagatattcccaaacatgctcaagtttgctgatgcttgtgggataccggcagcgcgagtgacgaagaaggaagagcttagagcggcaattcagagaatgttggacacccctggcccctaccttcttgatgtcattgtgccccatcaggagcatgtgttgccgatgattcccagtaatggatccttcaaggatgtgataactgagggtgatggtagaacgaggtactgattgcctagaccaaatgttccttgatgcttgttttgtacaatatatataagataatgctgtcctagttgcaggatttggcctgtggtgagcatcatagtctgtagtagttttggtagcaagacattttattttccttttatttaacttactacatgcagtagcatctatctatctctgtagtctgatatctcctgttgtctgtattgtgccgttggattttttgctgtagtgagactgaaaatgatgtgctagtaataatatttctgttagaaatctaagtagagaatctgttgaagaagtcaaaagctaatggaatcaggttacatattcaatgtttttctttttttagcggttggtagacgtgtagattcaacttctcttggagctcacctaggcaatcagtaaaatgcatattccttttttaacttgccatttatttacttttagtggaaattgtgaccaatttgttcatgtagaacggatttggaccattgcgtccacaaaacgtctcttttgctcgatcttcacaaagcgataccgaaatccagagatagttttcaaaagtcagaaatggcaaagttataaatagtaaaacagaatagatgctgtaatcgacttcaataacaagtggcatcacgtttctagttctagacccatcagctgaggtacaaattaattaataagtgactagggtcacgtgaccctagtcacttatgattccgatgacttcgtaggttcctagctcaagccgctcgtgtccaagcgtcacttacgattagctaatgattacggcatctaggaccgactagttcttatgtgcttctagtctccaaatgtggttgatagttattttgctctaagatcaacagtaatgaagtataaatcatcgttgtggtgtgctactcggttaattgagcattaacacacacaaacatgacgaggatggtataatctccaaaaatgtgtactttgttaggtgggaccctatagccttgattaatgtgctatgttaggcatgcctggaaacgtgtgacgcatatgttttgtgaacctgttgatattatatgtgcttttatattaccatattttattaaaatactaatatttattactagtaagatataacattctatctagcttaaaaactaaccataaatattccataataactagatttaccaaactaatatactaaatatacataataaatacaaaattaacaagacaataatcaatatttatgagcttaatatatttagacattatggttggtcgacgataatcatgctaacttttcgtaattgcttgattgaaatatgcttagaataatgcctctttgttctacatggcaaatagggaccattatggtgtaacaccctgggaaccacaaacaccccgaaatgctactaaactacacaactaaccttcatatataaaatttcgacagcatctcctttgaaaatttgcatagacgtggaagcaacagagtataaacagatctagctagctaagtttaaacggccggccatttacaattgaatatatcctgcca

SEQ ID NO: 116 - DNA, 15357 bp, Artificial Sequence
  PHP81343 T-DNA
aattacaacggtatatatcctgtcagccaacaccaaaacatcaaaaaaatcgggatcaggatcaggatctgcggccgcatcctgcaggtttaaacggccggccttcactagctagctgctaagctcaaacgagcaggaagcaacgagagggtggcgcgcgaccgacgtgcgtacgtagcatgagcctgagtggagacgttggacgtgtatgtatatacctctctgcgtgttaactatgtacgtaagcggcaggcagtgcaataagtgtggctctgtagtatgtacgtgcgggtacgatgctgtaagctactgaggcaagtccataaataaataatgacacgtgcgtgttctataatctcttcgcttcttcatttgtccccttgcggagtttggcatccattgatgccgttacgctgagaacagacacagcagacgaaccaaaagtgagttcttgtatgaaactatgacccttcatcgctaggctcaaacagcaccccgtacgaacacagcaaattagtcatctaactattagcccctacatgtttcagacgatacataaatatagcccatccttagcaattagctattggccctgcccatcccaagcaatgatctcgaagtatttttaatatatagtatttttaatatgtagcttttaaaattagaagataattttgagacaaaaatctccaagtatttttttgggtattttttactgcctccgtttttctttatttctcgtcacctagtttaattttgtgctaatcggctataaacgaaacagagagaaaagttactctaaaagcaactccaacagattagatataaatcttatatcctgcctagagctgttaaaaagatagacaactttagtggattagtgtatgcaacaaactctccaaatttaagtatcccaactacccaacgcatatcgttcccttttcattggcgcacgaactttcacctgctatagccgacgtacatgttcgttttttttgggcggcgcttactttcttccccgttcgttctcagcatcgcaactcaatttgttatggcggagaagcccttgtatcccaggtagtaatgcacagatatgcattattattattcataaaatcgagctagttaccctatgaggtgacatgaagcgctcacggttactatgacggttagcttcacgactgttggtggcagtagcgtacgacttagctatagttccggacttacctaactgactagagtcacacttagctgaccctagtcacttaggcgcgccgtcgacggatccgtaccatcaactttgtataataaagttgcccgcggccgccggtacctctgttaatgaacgtaaggagcttctggatgacggctgggacttctttgacaaagagacagagctctaagtgtcttcttttcagtagattatcggtgctagaataaaagagatatgaagggattctgggttctgctctatgtagagtaaagcttggatctttgatctaatctaccgttagtataaaacatctattgagctctcttttatttttcttctcagtgtatagtttgcttattgtttttttggtgtttttttccacctctttgtggtactgacataaacaaagactatcgttttgtcatagaattttgagattttgaagaaaagttggataatttagtatactttttaactgactttataaaacgaattagcttcaattagagcttcacaattctcggattttactgaatgacaagttaacaatttaagctagaaaaaaatatgctctaagcctggacatgttgttagtcatggccagcgtatgtgtacattaggtaaatgaaaacaaaaacaaaaactttgaaggtttctgttaagaaaggaactaatttagcaataagagacatgatattacaagctcaacactgtcgctatatctaccagaagccaacaaatcttccagtgcgtaccattggagccacttttcaggctcattagacaaaagtagcacatataatgtaaagacgaaacgatgataaagagactcacaaggacataatttcaatacagaagaagtttgatgtcattactcattagaaagaaaggtataacacaggaacggaaacatagttgaacaattattcatcaggggctttacaaggccccaaaacacaaaccaccaaagttttaaatgaaacgagacatgaacttcttctgattcataacagagataagtttcctaggtcccaatctagttcagtctcaattccagggaagcgcatggtctgacctcggactgtccatacttccagatagcgccagatcctccgttgatgtggtcctcaccgtgcattggaaagagagggagagtccttctgtgttccaagtaagcatcacctccgcattcctcttcttcttggtgtccctccaagccgaagagaggtttagccctatcgaagaagttgtagggagcggaggagtagtggtgatccatgtttgcccatccgcctccaacgttgttgtagttcatggagcaatcttgctccatagagccgtacacgtgggaagacatgtagccgttggaggcgttgacaactccacattcggttccagaggaggcatggttgagattcccgttgttgaaagaggggtagggcttgttgtggtggtagaggtgatggtcctggttcaacttcacgttgacggagtttgcgggtctttgcataggaactccgtggtggtgatgaagcaaaggatggtagtggtcgttggcggccatcataacagaattgggtgatgaggaaggagtggtcatgttagtcccgttgaaacgcttcttctgcctctcacgagccttgtggttctggaaccagtagaagacgttcttaccctcgatcttaccgaattgacgcaggcgagcggtgatcttctgaatctgatcagcagtaggggagcggatggcattgttgtagtacaactccttcaggatcttgatctgctcagtggtaggtgtccatctggtggaggtctgtctgcaagtgtaccctccggaaccggacttgttgttgttgttgttcccggactcttgatcggcctgatggtggtgatgttggtgctgaggaggctccatggtatgattattgctacggatcttttaaggttccggagagaggattatagtttctcaatctaacaaaaacacaattcaaacacatgtagtatagtacggttctctctcagagaaaaagacacaacaaacatatcaacattttcttttctttctttcttgttttttttaaagaaagtttaattttttttttcttttgacttttttatggagaaaaataacgcagttttggggaaacgcggatttgtaatatcgagaaggatatttggtctggttggtttaatttgtgatgcaaatgtgatcgactgatcgttaaaaaagtgaaaattttgagatgggtcaattttgtttcaaaaattttaatgaaaaaagggtgaaaaattaaagaggtggacaattgtgaaaaaaaaaaaaaagagaaggtaagagagtcaaaagagttgaaagagaaggtgaaaagttaaaagcaccgacctgggcaagagtgaaaggtgatgaagatgatccaaaaaaccctccaacgttgttgttgttccttgctatcatcgaaggcatgtttctcgccggaatcatcataataacggcttgcatacttcacatgcctcaaaaaccaccaccaacaagtatatgtagaattgactctttctctctctatatatatcactttctctctcctaagaggttcttggatagagaaaaagcttaagaagttgagcccttggattttctgtcagatagcaatgtcaaagcgagtaagtgtgtgtgttactacaaaaaaactcagtgatacaaacgtgacctccaagagaaaaaaaagattaaagagaaaaaaacttaatcaaaatttcgaaacaaatatacgctatgcatatatcatatcaaaatatatgaattaaaaagcaaagaaatattgtaacccttatctgatcttgtcttttcgcaaaacaaaatcaaaacttttttaaagaaaatataacacccacgaagatctcggagaaaatcctacaacgcatatcctatatatcaggatatttttctttttttttcttgcagacctaataacgttccttttctcacagccctagctacaagtgactcacctgaaaaatgttagaactcacaaaaaaaaaaaaaaaaattgtaccaaacagtttcattagttagtttcttttttttttctttaaaaaaaaacaatgaccttagacaaccttaacaaaaaaaacatgaatgttacagagattcacgcagtgaccctggttgcgacagaagttttacaaacaagattttttttaacttaccagtgagagtgggagtagaagatgaaggtgtagatctgttttgggttgaaaagagatgaccgttttgaaggaagggtttgggacagttttgaaaaaaaaaatgtttacttatatggtaaaaaagaaaagaaaaagaagctatggcatgaagaggtgttacagagagaaagtgaggagaagaagaagagatagggacaagggcattgaaggaggagagggaagtggggaacaaatggaggaaaatgtggcagcgaagagtaattgcagagcgtattgagagggtgcaattgcatttaatggagggcaaaagaggtgtaattgatagagaggggagagagaaagagacgcagcatatttttggtgtataaaactactaataaattttttgcgagttgacggtgcaatgcaacgaatgacggctaccaaacaaatgctactaaattgctactaagtgctggtatcttgaaattaatttgtgcgtgtcactcccattcatttcttcttctcttttgcagtttttccgatcggataagtatagagtttgtttttttttcccccattaagacaagtgtaattggttcaagaattgaaagagttcttagtattgaaattaaatgttattaatgtgctttaatgtgatttttaatatgtttttaatgtcacttttaatgatgttttatgaatatatatatatatatatatatatatatatatatatatataatattacatattaaaaatcttttagatatgatttttaaagtaattattataaaaataagaatattatcttacatgataaattatacactatttaaaatatatttaacaagatattttaattagtttttaatttttttactagtttaaaaatttggtaaataagtttttatttaacaactctaaggatttttgaaacactaaagttatatttttaaaaatgttagtttttttttgtaactttttatatttattatgttattgttgttgaatatttattagaattttttttaatctattttatataaggaaaaaattcattatttttaactttttatatataatagagttttctcatttttaccattttattatatatgatattgatagtgatatataataaaatagaagttgatatattaaaaagtgttaccttaagtaacgttttaaaaaatgttagaagttattaaaaattttaagttatattttttaaaacactagtttttataactttttgtatttattcttttttgttctttaacatttataagttttcctttttaatcttttttatttaagaaaaaaaaattaacttttttacatatgatagaattttctcatttttaccattttattatatatgatattgatggtgatatataataagtttatgtagatttttttatatttcataaataaaaagctacaaatgtttaaaattaatttaatactaacattataaatattatagttctttttatagaaaaaagtcaaattaaaagttgtataaaaatatgtccatgtaattttatattgttcagttactttaataaataattttatcaaccattttatgatttaataagatatattttcaacattcaactactaattaactttttgactttagttagttttgtcaaaactagtaaaaaaactagctagaagtaggcaagctagttggtaaaccggaaactaaaaaattagtttgttgaagtaggtgaaaaatataaaatgataaaaaaaataataaaatcataatttattttaagaaaagataacaaagaaaataaataaatatattaataataaaattgaaagaaaatataaaaaattagaattcagaaggtaatatcttaaaagaatgttaggtgtttcaaaaaacgttaaaatactactaaaaaactcccgggccattctggcccactttgtacaagaaagctgggtgcccggggttaaccttcagcttagaaatgatgtgttttctacacttttctcttcttttttttcttttcatctcacatgaatcaaaaagagaaagcttaattacattaaaggttgatgtgatatttactttctaaatatttgctagaagaaattataatgataacattaaattaagttatagtcatttctatttcggttgtctcccactttctgctatgcttttacaacaacagttcaagatttggaatcgttttctttctccaccaatcgtagtaatacttctttttgtgtttgttgaaattttgcaagattctctcttcctctggttaatacacataacttacttggtaagcttggctgcattttcttttcaagcttttaatcaaagactcactagaaattgcaaaggcaaacataaaattatgtgatcaaactcctactgtgagtttttggttacaaacaaaagttaaaaacaaaagcttgatatttaaaagataaactcaacacatatgcatttgactggcgcacagaagacaattcaagacttgggaaaacagtgagccatcaaaatcgtcagataattcagggaatatattgaatgtggagatgtggtaatcacactattgcacacaaagagtggcaaacaagcggcgcccttggtttggtatagtaagagacaattgttttggactgtttgtgttgccatattcacaaaaatactattgagctatgtatgttaaacattatggtcaatgagtagtagtgaacattcaagtttttttttttttccacttcaagtttttcatcttattattatttttcgttgtgatgcagtagtacggcccatcttcaccagtagtatatcaaagccgaaacagatgacaaattgtttaacatgcacttggattattattgagagttgaaatacaaaggcccgttacaagcccaaacgaaggtacataaaagaaaagcagaaaatgaaaacgaaatcgatagggataagtttttccaactgacggaaacacaaactacaccaggtgaaatagatcacctcccaagtgcatgagacacgaaccaaccacttatcatcagatcacaaaagagctcaaagatctagcgatcgcctaattcagtttgtggccaagctttgatggcaagtcgcaatatctagcgacggccacctcgtgctgctccacataagtctccttgtcggcctcttttatgcgctcgagtctatggtccacgtaatacacgccgggcattttcaagtttttggcaggctttttggagcggtaggtggtcttgaagttacagatgagatggcctccgccgacaagcttcaaggccatgtcggatctaccttcaagaccaccgtcggctgggtaaagcatttcagtattggcttcccagccgagagtcttcttctgcatcacgggaccgtttgatgggaagttcacgccgcggatcttgacgttgtagatcaagcagccgtcttgaagactagtgtcttgggtggcggtcaagactcctccgtcttcgtaggtggtcactctctcccaggtgaatccctctgggaatgactgtttgaagaagtctgggatgccctgggtgtggttgatgaaggttctactcccgtacatgaaggaggtggctagtatgtcgaaggcgaatgggagtggacctccttcgaccaccttgattctcatagtctgggttccctcatagggcttgccctcaccctcagaggtacacttgaagtggtgattattcacggtgccctccatgtataacttcatgtgcatgttctctttaatgagctcctcccccttggacaccatggctgtagagtcaacaatcacaagataaatcagaatcaaaatccatcacgtaatttcaagaagcaatttcgtgaaaaaaaatcctaatctatggccacagaatcaacaaataaggtagttgctaaaggacctgagcaatatctcttgaaataccatacagaatcaacgaataaggcttttatcaacggatctgaacaatttcttgaaaaacgactgaagtatcaacaaataaggctgttgtttaacggatctgaagtagttcatgaaaaaaaccttaatctacgactacagaatcaacaattaaggcttgttgtaaacggatctgaaaatctttatgaaaaaaactctaattagacctaatttacggttataaaatcatcaattaaggacgttcttgcattaataaaagctgaatcttctgattatgaaaatttataatcgatgaaacgatagaaaacacaatcaaatcaacatcatgctgatgtagaacaaacaataaagaagaagaaaaaaaaacggaagaaatctacgaaccttgaaaggagaggtagggaactgcgcaaagagaatgaactaatttgattgcaattgaagtgcgattagggtcgaggggtgtgggggcattttatagcatatgcggtggaaccgttctccaatcatattgtgacgcgtgcccatgtatggtgtgacttggtgtttatgacacagatgatatttcggggagtccttcgtagttgacggtttcgtaatcttgacggagtcagagatgtaccttcaccgcttcacgcttggctttatccgttaccacggcgttattaaattgggcccgcacccgttgcaagttaggaccacagtgtccattacctgaacggtcggctgctaccagtattttacattattaaaatctatggaaaagctgtcacgctagatttttttttttttttttatggataagaaaagactaataggaaagctttcttactccactaaagtctttaataattattttttcaattttcaaataaaatcataatcatcccactaaattctttctcatttgtttttcactttgtaagatattcttccgtagatttttataagtaattctttaagatacatagcataataaattgtatacttttagttacagtctatataaaattagtcatttaaaaaatatagccttaatgatttttttaaaatgaagttatttttttctaatttttctttcttatttattatcgaatgattttttctactaatcgtttagggaagagttttatttttctaatgacgagatgtgttaaatgatgcaacttgaaggcgacatattttttaccaataaaataaaactaaaagatagcttgttgacaaaaacaataattgatgttaaagaaaacgtaagggcaatgggtatcatctaattgttggacaagttgtcttctaaggctaggtaagcttttgttttttattagctgaaatatttatttaattgttctataaataaattttttaaaatgatttttaatgtttttaaatattatttaaaataatttttttaaaattttaacattttagtttttaattattttttatcttacttaaattaattataatttattattttctaccattttatactttccaattaattttatcgaagcattaataccatctggtattttgtcactgcttcgtatgattgtttattaaattttagcttctttcacattggagatgctgggcggtgtgagttacagcatggtgtgaagttaaggtggtttgattatggaacccgaaggtgttggtgcaaggtggataaaattgcttgccaggagatacataaaatgatttacaaaatgaaataaagaataaataaatagtcaagttcaaatttaaatcaaggattagaattatttttccgtacatgatgtaaccgcaatcaccccctgctgaatccagatggccattctggccgaatttaagtgactagggtcaccctgctgaatccagatggccattctggccgaatttaagtgactagggtcacgtgaccctagtcacttaccggattctggccgtaccgagctcgaattcggcccaacttttctatacaaagttgaggtacgagatccgcccatccggccggccagatcctgcaggagatccaagcttggcgcgccgcggacctgaattccagcacactggcggccgttactagtaacggccgccagtgtgctggaattcgcccttcccaagctttgctctagatcaaactcacatccaaacataacatggatatcttccttaccaatcatactaattattttgggttaaatattaatcattatttttaagatattaattaagaaattaaaagattttttaaaaaaatgtataaaattatattattcatgatttttcatacatttgattttgataataaatatattttttttaatttcttaaaaaatgttgcaagacacttattagacatagtcttgttctgtttacaaaagcattcatcatttaatacattaaaaaatatttaatactaacagtagaatcttcttgtgagtggtgtgggagtaggcaacctggcattgaaacgagagaaagagagtcagaaccagaagacaaataaaaagtatgcaacaaacaaatcaaaatcaaagggcaaaggctggggttggctcaattggttgctacattcaattttcaactcagtcaacggttgagattcactctgacttccccaatctaagccgcggatgcaaacggttgaatctaacccacaatccaatctcgttacttaggggcttttccgtcattaactcacccctgccacccggtttccctataaattggaactcaatgctcccctctaaactcgtatcgcttcagagttgagaccaagacacactcgttcatatatctctctgctcttctcttctcttctacctctcaaggtacttttcttctccctctaccaaatcctagattccgtggttcaatttcggatcttgcacttctggtttgctttgccttgctttttcctcaactgggtccatctaggatccatgtgaaactctactctttctttaatatctgcggaatacgcgtttgactttcagatctagtcgaaatcatttcataattgcctttctttcttttagcttatgagaaataaaatcactttttttttatttcaaaataaaccttgggccttgtgctgactgagatggggtttggtgattacagaattttagcgaattttgtaattgtacttgtttgtctgtagttttgttttgttttcttgtttctcatacattccttaggcttcaattttattcgagtataggtcacaataggaattcaaactttgagcaggggaattaatcccttccttcaaatccagtttgtttgtatatatgtttaaaaaatgaaacttttgctttaaattctattataactttttttatggctgaaatttttgcatgtgtctttgctctctgttgtaaatttactgtttaggtactaactctaggcttgttgtgcagtttttgaagtataacaacagaagttcctattccgaagttcctattctctagaaagtataggaacttccaccacacaacacaatggcggccaccgcttccagaaccacccgattctcttcttcctcttcacaccccaccttccccaaacgcattactagatccaccctccctctctctcatcaaaccctcaccaaacccaaccacgctctcaaaatcaaatgttccatctccaaaccccccacggcggcgcccttcaccaaggaagcgccgaccacggagcccttcgtgtcacggttcgcctccggcgaacctcgcaagggcgcggacatccttgtggaggcgctggagaggcagggcgtgacgacggtgttcgcgtaccccggcggtgcgtcgatggagatccaccaggcgctcacgcgctccgccgccatccgcaacgtgctcccgcgccacgagcagggcggcgtcttcgccgccgaaggctacgcgcgttcctccggcctccccggcgtctgcattgccacctccggccccggcgccaccaacctcgtgagcggcctcgccgacgctttaatggacagcgtcccagtcgtcgccatcaccggccaggtcgcccgccggatgatcggcaccgacgccttccaagaaaccccgatcgtggaggtgagcagatccatcacgaagcacaactacctcatcctcgacgtcgacgacatcccccgcgtcgtcgccgaggctttcttcgtcgccacctccggccgccccggtccggtcctcatcgacattcccaaagacgttcagcagcaactcgccgtgcctaattgggacgagcccgttaacctccccggttacctcgccaggctgcccaggccccccgccgaggcccaattggaacacattgtcagactcatcatggaggcccaaaagcccgttctctacgtcggcggtggcagtttgaattccagtgctgaattgaggcgctttgttgaactcactggtattcccgttgctagcactttaatgggtcttggaacttttcctattggtgatgaatattcccttcagatgctgggtatgcatggtactgtttatgctaactatgctgttgacaatagtgatttgttgcttgcctttggggtaaggtttgatgaccgtgttactgggaagcttgaggcttttgctagtagggctaagattgttcacattgatattgattctgccgagattgggaagaacaagcaggcgcacgtgtcggtttgcgcggatttgaagttggccttgaagggaattaatatgattttggaggagaaaggagtggagggtaagtttgatcttggaggttggagagaagagattaatgtgcagaaacacaagtttccattgggttacaagacattccaggacgcgatttctccgcagcatgctatcgaggttcttgatgagttgactaatggagatgctattgttagtactggggttgggcagcatcaaatgtgggctgcgcagttttacaagtacaagagaccgaggcagtggttgacctcagggggtcttggagccatgggttttggattgcctgcggctattggtgctgctgttgctaaccctggggctgttgtggttgacattgatggggatggtagtttcatcatgaatgttcaggagttggccactataagagtggagaatctcccagttaagatattgttgttgaacaatcagcatttgggtatggtggttcagttggaggataggttctacaagtccaatagagctcacacctatcttggagatccgtctagcgagagcgagatattcccaaacatgctcaagtttgctgatgcttgtgggataccggcagcgcgagtgacgaagaaggaagagcttagagcggcaattcagagaatgttggacacccctggcccctaccttcttgatgtcattgtgccccatcaggagcatgtgttgccgatgattcccagtaatggatccttcaaggatgtgataactgagggtgatggtagaacgaggtactgattgcctagaccaaatgttccttgatgcttgttttgtacaatatatataagataatgctgtcctagttgcaggatttggcctgtggtgagcatcatagtctgtagtagttttggtagcaagacattttattttccttttatttaacttactacatgcagtagcatctatctatctctgtagtctgatatctcctgttgtctgtattgtgccgttggattttttgctgtagtgagactgaaaatgatgtgctagtaataatatttctgttagaaatctaagtagagaatctgttgaagaagtcaaaagctaatggaatcaggttacatattcaatgtttttctttttttagcggttggtagacgtgtagattcaacttctcttggagctcacctaggcaatcagtaaaatgcatattccttttttaacttgccatttatttacttttagtggaaattgtgaccaatttgttcatgtagaacggatttggaccattgcgtccacaaaacgtctcttttgctcgatcttcacaaagcgataccgaaatccagagatagttttcaaaagtcagaaatggcaaagttataaatagtaaaacagaatagatgctgtaatcgacttcaataacaagtggcatcacgtttctagttctagacccatcagctgaggtacaaattaattaataagtgactagggtcacgtgaccctagtcacttatgattccgatgacttcgtaggttcctagctcaagccgctcgtgtccaagcgtcacttacgattagctaatgattacggcatctaggaccgactagttcttatgtgcttctagtctccaaatgtggttgatagttattttgctctaagatcaacagtaatgaagtataaatcatcgttgtggtgtgctactcggttaattgagcattaacacacacaaacatgacgaggatggtataatctccaaaaatgtgtactttgttaggtgggaccctatagccttgattaatgtgctatgttaggcatgcctggaaacgtgtgacgcatatgttttgtgaacctgttgatattatatgtgcttttatattaccatattttattaaaatactaatatttattactagtaagatataacattctatctagcttaaaaactaaccataaatattccataataactagatttaccaaactaatatactaaatatacataataaatacaaaattaacaagacaataatcaatatttatgagcttaatatatttagacattatggttggtcgacgataatcatgctaacttttcgtaattgcttgattgaaatatgcttagaataatgcctctttgttctacatggcaaatagggaccattatggtgtaacaccctgggaaccacaaacaccccgaaatgctactaaactacacaactaaccttcatatataaaatttcgacagcatctcctttgaaaatttgcatagacgtggaagcaacagagtataaacagatctagctagctaagtttaaacggccggccatttacaattgaatatatcctgcca

SEQ ID NO: 117 - DNA, 9769 bp, Artificial Sequence
  plasmid QC318
tttgtacaaacttgtgattcttccttaccaatcatactaattattttgggttaaatattaatcattatttttaagatattaattaagaaattaaaagattttttaaaaaaatgtataaaattatattattcatgatttttcatacatttgattttgataataaatatattttttttaatttcttaaaaaatgttgcaagacacttattagacatagtcttgttctgtttacaaaagcattcatcatttaatacattaaaaaatatttaatactaacagtagaatcttcttgtgagtggtgtgggagtaggcaacctggcattgaaacgagagaaagagagtcagaaccagaagacaaataaaaagtatgcaacaaacaaatcaaaatcaaagggcaaaggctggggttggctcaattggttgctacattcaattttcaactcagtcaacggttgagattcactctgacttccccaatctaagccgcggatgcaaacggttgaatctaacccacaatccaatctcgttacttaggggcttttccgtcattaactcacccctgccacccggtttccctataaattggaactcaatgctcccctctaaactcgtatcgcttcagagttgagaccaagacacactcgttcatatatctctctgctcttctcttctcttctacctctcaaggtacttttcttctccctctaccaaatcctagattccgtggttcaatttcggatcttgcacttctggtttgctttgccttgctttttcctcaactgggtccatctaggatccatgtgaaactctactctttctttaatatctgcggaatacgcgtttgactttcagatctagtcgaaatcatttcataattgcctttctttcttttagcttatgagaaataaaatcactttttttttatttcaaaataaaccttgggccttgtgctgactgagatggggtttggtgattacagaattttagcgaattttgtaattgtacttgtttgtctgtagttttgttttgttttcttgtttctcatacattccttaggcttcaattttattcgagtataggtcacaataggaattcaaactttgagcaggggaattaatcccttccttcaaatccagtttgtttgtatatatgtttaaaaaatgaaacttttgctttaaattctattataactttttttatggctgaaatttttgcatgtgtctttgctctctgttgtaaatttactgtttaggtactaactctaggcttgttgtgcagtttttgaagtataaccatgccacacaacacaatggcggccaccgcttccagaaccacccgattctcttcttcctcttcacaccccaccttccccaaacgcattactagatccaccctccctctctctcatcaaaccctcaccaaacccaaccacgctctcaaaatcaaatgttccatctccaaaccccccacggcggcgcccttcaccaaggaagcgccgaccacggagcccttcgtgtcacggttcgcctccggcgaacctcgcaagggcgcggacatccttgtggaggcgctggagaggcagggcgtgacgacggtgttcgcgtaccccggcggtgcgtcgatggagatccaccaggcgctcacgcgctccgccgccatccgcaacgtgctcccgcgccacgagcagggcggcgtcttcgccgccgaaggctacgcgcgttcctccggcctccccggcgtctgcattgccacctccggccccggcgccaccaacctcgtgagcggcctcgccgacgctttaatggacagcgtcccagtcgtcgccatcaccggccaggtcgcccgccggatgatcggcaccgacgccttccaagaaaccccgatcgtggaggtgagcagatccatcacgaagcacaactacctcatcctcgacgtcgacgacatcccccgcgtcgtcgccgaggctttcttcgtcgccacctccggccgccccggtccggtcctcatcgacattcccaaagacgttcagcagcaactcgccgtgcctaattgggacgagcccgttaacctccccggttacctcgccaggctgcccaggccccccgccgaggcccaattggaacacattgtcagactcatcatggaggcccaaaagcccgttctctacgtcggcggtggcagtttgaattccagtgctgaattgaggcgctttgttgaactcactggtattcccgttgctagcactttaatgggtcttggaacttttcctattggtgatgaatattcccttcagatgctgggtatgcatggtactgtttatgctaactatgctgttgacaatagtgatttgttgcttgcctttggggtaaggtttgatgaccgtgttactgggaagcttgaggcttttgctagtagggctaagattgttcacattgatattgattctgccgagattgggaagaacaagcaggcgcacgtgtcggtttgcgcggatttgaagttggccttgaagggaattaatatgattttggaggagaaaggagtggagggtaagtttgatcttggaggttggagagaagagattaatgtgcagaaacacaagtttccattgggttacaagacattccaggacgcgatttctccgcagcatgctatcgaggttcttgatgagttgactaatggagatgctattgttagtactggggttgggcagcatcaaatgtgggctgcgcagttttacaagtacaagagaccgaggcagtggttgacctcagggggtcttggagccatgggttttggattgcctgcggctattggtgctgctgttgctaaccctggggctgttgtggttgacattgatggggatggtagtttcatcatgaatgttcaggagttggccactataagagtggagaatctcccagttaagatattgttgttgaacaatcagcatttgggtatggtggttcagttggaggataggttctacaagtccaatagagctcacacctatcttggagatccgtctagcgagagcgagatattcccaaacatgctcaagtttgctgatgcttgtgggataccggcagcgcgagtgacgaagaaggaagagcttagagcggcaattcagagaatgttggacacccctggcccctaccttcttgatgtcattgtgccccatcaggagcatgtgttgccgatgattcccagtaatggatccttcaaggatgtgataactgagggtgatggtagaacgaggtactgattgcctagaccaaatgttccttgatgcttgttttgtacaatatatataagataatgctgtcctagttgcaggatttggcctgtggtgagcatcatagtctgtagtagttttggtagcaagacattttattttccttttatttaacttactacatgcagtagcatctatctatctctgtagtctgatatctcctgttgtctgtattgtgccgttggattttttgctgtagtgagactgaaaatgatgtgctagtaataatatttctgttagaaatctaagtagagaatctgttgaagaagtcaaaagctaatggaatcaggttacatattcaatgtttttctttttttagcggttggtagacgtgtagattcaacttctcttggagctcacctaggcaatcagtaaaatgcatattccttttttaacttgccatttatttacttttagtggaaattgtgaccaatttgttcatgtagaacggatttggaccattgcgtccacaaaacgtctcttttgctcgatcttcacaaagcgataccgaaatccagagatagttttcaaaagtcagaaatggcaaagttataaatagtaaaacagaatagatgctgtaatcgacttcaataacaagtggcatcacgtttctagttctagacccgggtaccggcgcgcccgatcatccggatatagttcctcctttcagcaaaaaacccctcaagacccgtttagaggccccaaggggttatgctagttattgctcagcggtggcagcagccaactcagcttcctttcgggctttgttagcagccggatcgatccaagctgtacctcactattcctttgccctcggacgagtgctggggcgtcggtttccactatcggcgagtacttctacacagccatcggtccagacggccgcgcttctgcgggcgatttgtgtacgcccgacagtcccggctccggatcggacgattgcgtcgcatcgaccctgcgcccaagctgcatcatcgaaattgccgtcaaccaagctctgatagagttggtcaagaccaatgcggagcatatacgcccggagccgcggcgatcctgcaagctccggatgcctccgctcgaagtagcgcgtctgctgctccatacaagccaaccacggcctccagaagaagatgttggcgacctcgtattgggaatccccgaacatcgcctcgctccagtcaatgaccgctgttatgcggccattgtccgtcaggacattgttggagccgaaatccgcgtgcacgaggtgccggacttcggggcagtcctcggcccaaagcatcagctcatcgagagcctgcgcgacggacgcactgacggtgtcgtccatcacagtttgccagtgatacacatggggatcagcaatcgcgcatatgaaatcacgccatgtagtgtattgaccgattccttgcggtccgaatgggccgaacccgctcgtctggctaagatcggccgcagcgatcgcatccatagcctccgcgaccggctgcagaacagcgggcagttcggtttcaggcaggtcttgcaacgtgacaccctgtgcacggcgggagatgcaataggtcaggctctcgctgaattccccaatgtcaagcacttccggaatcgggagcgcggccgatgcaaagtgccgataaacataacgatctttgtagaaaccatcggcgcagctatttacccgcaggacatatccacgccctcctacatcgaagctgaaagcacgagattcttcgccctccgagagctgcatcaggtcggagacgctgtcgaacttttcgatcagaaacttctcgacagacgtcgcggtgagttcaggcttttccatgggtatatctccttcttaaagttaaacaaaattatttctagagggaaaccgttgtggtctccctatagtgagtcgtattaatttcgcgggatcgagatctgatcaacctgcattaatgaatcggccaacgcgcggggagaggcggtttgcgtattgggcgctcttccgcttcctcgctcactgactcgctgcgctcggtcgttcggctgcggcgagcggtatcagctcactcaaaggcggtaatacggttatccacagaatcaggggataacgcaggaaagaacatgtgagcaaaaggccagcaaaaggccaggaaccgtaaaaaggccgcgttgctggcgtttttccataggctccgcccccctgacgagcatcacaaaaatcgacgctcaagtcagaggtggcgaaacccgacaggactataaagataccaggcgtttccccctggaagctccctcgtgcgctctcctgttccgaccctgccgcttaccggatacctgtccgcctttctcccttcgggaagcgtggcgctttctcaatgctcacgctgtaggtatctcagttcggtgtaggtcgttcgctccaagctgggctgtgtgcacgaaccccccgttcagcccgaccgctgcgccttatccggtaactatcgtcttgagtccaacccggtaagacacgacttatcgccactggcagcagccactggtaacaggattagcagagcgaggtatgtaggcggtgctacagagttcttgaagtggtggcctaactacggctacactagaaggacagtatttggtatctgcgctctgctgaagccagttaccttcggaaaaagagttggtagctcttgatccggcaaacaaaccaccgctggtagcggtggtttttttgtttgcaagcagcagattacgcgcagaaaaaaaggatctcaagaagatcctttgatcttttctacggggtctgacgctcagtggaacgaaaactcacgttaagggattttggtcatgacattaacctataaaaataggcgtatcacgaggccctttcgtctcgcgcgtttcggtgatgacggtgaaaacctctgacacatgcagctcccggagacggtcacagcttgtctgtaagcggatgccgggagcagacaagcccgtcagggcgcgtcagcgggtgttggcgggtgtcggggctggcttaactatgcggcatcagagcagattgtactgagagtgcaccatatggacatattgtcgttagaacgcggctacaattaatacataaccttatgtatcatacacatacgatttaggtgacactatagaacggcgcgccggtaccgggccccccctcgagtgcggccgcaagcttgtcgacggagatcaccactttgtacaagaaagctgggtctagatatctcgacccgggcaatcaaattatatatgtaaagcaattacagtttatcaaactttatttatggaaataatttattatcacatttattttggtttataaattttaaattaaaatatcacctaaataaaaataatttttaacatgacttattgtcctaaataaattatttccgtaaattaaataaaatgaagtttttttctttcaaagaatctaaatggtcataatgagaattctctaaaaaaatacataatgagaataattatggaatttatttattaataaaaattaatagcattttgatagacaattaataaaattttaaaaataaccatatagaaataataatttttttactatcggttccaattaaaataatgataaaaaataaaatagattattaattgatattgatatgaaatttaaataaagaatataatcatatattttattgatatatgatatgatatagattaattgatattgattttgatatggaatttaaaaataatataataattgtttttatttattaatacgtgtaatcaaataattctcactttttgaatcaatcagtgtacttaaagataatatcagttgaatattttttatccttttacgtgtgctgtgagacattatcatcaattgtgttgtatatgatatatagatatagatatataaatatatagattgagtgatataatatatttaaaatataaattatatatatgttttaatatatttttgcatatatatatatatttgtaaaaactagaagtattttttcatgagataattattatcgagttgaataagtctattatttgtgagagccaaccatatttatatatgtgattaaattttatctttgtgaaattaaaaataataaaaaataccttaaaatcataataatagaaaaacttatatttataatttaccattatacttaaaaaaaattaaataaatattataaatataaatactatcgagtaatggccgcgctagggtttttgagaaaaaatcttcccacgcactcaactgcactgtacggcgtcgttttcacagccgcataatagaagccgcgttccccaacccttcctcacaacattctcggaccctccagcaccgtcacccaaacaaatatccacgcggtagtaggcgcgtgaaacaaactctaatccgaactacgagacgtgagaagcacgcgctttagcgagcgtttcaattgtcgctacgaaagcagagaaggatacaaacggaactagggtaaattagtaagggtaatttcgtaaacagaagaaaagagttgtagctataaataaaccctctaaccctcgtcgcattacttctcttcacacctttgttcactcttcttctcttgcggctagggttttagcgcagcttcttctaggttcgttatctaccaccgttctatggattttattccttctattcgtgtttattctattggtttatgttgcttgcaatatgttttttctgaatctgtcgtcgttgtcttcaattttatccatgtttcagagatcaattttgtttgtgtagtatgtgcttattcttcttcttttcgttcgagttgttaataacggtgctatggtgttttcaaaagtgttttttttattacttttgatttaaagtttttttggtaaggcttttatttgcttgttatattcaaatctttggatccagatcttatataagtttttggttcaagaaagtttttggttactgatgaatagatctattaactgttactttaatcgattcaagctaaagttttttggttactgatgaatagatctattatctgttacttttaatcggttcaagctcaagttttttggttactgatgaatagatctatatacgtcacagtgtgctaaacatgcccttgttttatctcgatcttatgtatgggagtgccataaattttgttatgtctatttttttatctgttggaatcatactgagtttgatgcgttacgattgagcatacctatttttgggcttgttgtatggtgggtatttagatcttaatctttttatgcttatgaaaggttttgtaatgacaaaggtcttaatgttgttaaacttttatttttactttatatggtgtgttgatgtgttatggttttgacaactttttttttttctggatttttgcagatttaaggaagccatggcccacagcaagcacggcctgaaggaggagatgaccatgaagtaccacatggagggctgcgtgaacggccacaagttcgtgatcaccggcgagggcatcggctaccccttcaagggcaagcagaccatcaacctgtgcgtgatcgagggcggccccctgcccttcagcgaggacatcctgagcgccggcttcaagtacggcgaccggatcttcaccgagtacccccaggacatcgtggactacttcaagaacagctgccccgccggctacacctggggccggagcttcctgttcgaggacggcgccgtgtgcatctgtaacgtggacatcaccgtgagcgtgaaggagaactgcatctaccacaagagcatcttcaacggcgtgaacttccccgccgacggccccgtgatgaagaagatgaccaccaactgggaggccagctgcgagaagatcatgcccgtgcctaagcagggcatcctgaagggcgacgtgagcatgtacctgctgctgaaggacggcggccggtaccggtgccagttcgacaccgtgtacaaggccaagagcgtgcccagcaagatgcccgagtggcacttcatccagcacaagctgctgcgggaggaccggagcgacgccaagaaccagaagtggcagctgaccgagcacgccatcgccttccccagcgccctggcctgagagctcgaatttccccgatcgttcaaacatttggcaataaagtttcttaagattgaatcctgttgccggtcttgcgatgattatcatataatttctgttgaattacgttaagcatgtaataattaacatgtaatgcatgacgttatttatgagatgggtttttatgattagagtcccgcaattatacatttaatacgcgatagaaaacaaaatatagcgcgcaaactaggataaattatcgcgcgcggtgtcatctatgttactagatcgggaattctagtggccggcccagctgatatccatcacactggcggccgcactcgactgaattggttccggcgccagcctgcttt

SEQ ID NO: 118 - DNA, 6538 bp, Artificial Sequence
  plasmid pVER9662
ccgagatagggttgagtgttgttccagtttggaacaagagtccactattaaagaacgtggactccaacgtcaaagggcgaaaaaccgtctatcagggcgatggcccactacgtgaaccatcacccaaatcaagttttttggggtcgaggtgccgtaaagcactaaatcggaaccctaaagggagcccccgatttagagcttgacggggaaagccggcgaacgtggcgagaaaggaagggaagaaagcgaaaggagcgggcgctagggcgctggcaagtgtagcggtcacgctgcgcgtaaccaccacacccgccgcgcttaatgcgccgctacagggcgcgtactatggttgctttgacgtatgcggtgtgaaataccgcacagatgcgtaaggagaaaataccgcatcaggcgccattcgccattcaggctgcgcaactgttgggaagggcgatcggtgcgggcctcttcgctattacgccagctggcgaaagggggatgtgctgcaaggcgattaagttgggtaacgccagggttttcccagtcacgacgttgtaaaacgacggccagtgccaagcttaaggtgcacggccctacaggtcactaataccatctaagtagttggttcatagtgactgcatatgttgtgttttacagtattatgtagtctgttttttatgcaaaatctaatttaatatattgatatttatatcattttacgtttctcgttcaactttcttgtacaaagtggccgttaacggatctggccgcggccgcatcaggatattcttgtttaagatgttgaactctatggaggtttgtatgaactgatgatctaggaccggataagttcccttcttcatagcgaacttattcaaagaatgttttgtgtatcattcttgttacattgttattaatgaaaaaatattattggtcattggactgaacacgagtgttaaatatggaccaggccccaaataagatccattgatatatgaattaaataacaagaataaatcgagtcaccaaaccacttgccttttttaacgagacttgttcaccaacttgatacaaaagtcattatcctatgcaaatcaataatcatacaaaaatatccaataacactaaaaaattaaaagaaatggataatttcacaatatgttatacgataaagaagttacttttccaagaaattcactgattttataagcccacttgcattagataaatggcaaaaaaaaacaaaaaggaaaagaaataaagcacgaagaattctagaaaatacgaaatacgcttcaatgcagtgggacccacggttcaattattgccaattttcagctccaccgtatatttaaaaaataaaacgataatgctaaaaaaatataaatcgtaacgatcgttaaatctcaacggctggatcttatgacgaccgttagaaattgtggttgtcgacgagtcagtaataaacggcgtcaaagtggttgcagccggcacacacgagtcgtgtttatcaactcaaagcacaaatacttttcctcaacctaaaaataaggcaattagccaaaaacaactttgcgtgtaaacaacgctcaatacacgtgtcattttattattagctattgcttcaccgccttagctttctcgtgacctagtcgtcctcgtcttttcttcttcttcttctataaaacaatacccaaagagctcttcttcttcacaattcagatttcaatttctcaaaatcttaaaaactttctctcaattctctctaccgtgatcaaggtaaatttctgtgttccttattctctcaaaatcttcgattttgttttcgttcgatcccaatttcgtatatgttctttggtttagattctgttaatcttagatcgaagacgattttctgggtttgatcgttagatatcatcttaattctcgattagggtttcatagatatcatccgatttgttcaaataatttgagttttgtcgaataattactcttcgatttgtgatttctatctagatctggtgttagtttctagtttgtgcgatcgaatttgtcgattaatctgagtttttctgattaacagccatggagcctcctcagcaccaacatcaccaccatcaggccgatcaagagtccgggaacaacaacaacaacaagtccggttccggagggtacacttgcagacagacctccaccagatggacacctaccactgagcagatcaagatcctgaaggagttgtactacaacaatgccatccgctcccctactgctgatcagattcagaagatcaccgctcgcctgcgtcaattcggtaagatcgagggtaagaacgtcttctactggttccagaaccacaaggctcgtgagaggcagaagaagcgtttcaacgggactaacatgaccactccttcctcatcacccaattctgttatgatggccgccaacgaccactaccatcctttgcttcatcaccaccacggagttcctatgcaaagacccgcaaactccgtcaacgtgaagttgaaccaggaccatcacctctaccaccacaacaagccctacccctctttcaacaacgggaatctcaaccatgcctcctctggaaccgaatgtggagttgtcaacgcctccaacggctacatgtcttcccacgtgtacggctctatggagcaagattgctccatgaactacaacaacgttggaggcggatgggcaaacatggatcaccactactcctccgctccctacaacttcttcgatagggctaaacctctcttcggcttggagggacaccaagaagaagaggaatgcggaggtgatgcttacttggaacacagaaggactctccctctctttccaatgcacggtgaggaccacatcaacggaggatctggcgctatctggaagtatggacagtccgaggtcagaccatgcgcttccctggaattgagactgaactagattgggacctaggaaacttatctctgttatgaatcagaagaagttcatgtctcgtttcatttaaaactttggtggtttgtgttttggggccttgtaaagcccctgatgaataattgttcaactatgtttccgttcctgtgttatacctttctttctaatgagtaatgacatcaaacttcttctgtattgaaattatgtccttgtgagtctctttatcatcgtttcgtctttacattatatgtgctacttttgtctaatgagcctgaaaagtggctccaatggtacgcactggaagatttgttggcttctggtagatatagcgacagtgttgagcttgtaatatcatgtctcttattgctaaattagttcctttcttaacagaaaccttcaaagtttttgtttttgttttcatttacctaatgtacacatacgctggccatgactaacaacatgtccaggcttagagcatatttttttctagcttaaattgttaacttgtcattcagtaaaatccgagaattgtgaagctctaattgaagctaattcgttttataaagtcagttaaaaagtatactaaattatccaacttttcttcaaaatctcaaaattctatgacaaaacgatagtctttgtttatgtcagtaccacaaagaggtggaaaaaaacaccaaaaaaacaataagcaaactatacactgagaagaaaaataaaagagagctcaatagatgttttatactaacggtagattagatcaaagatccaagctttactctacatagagcagaacccagaatcccttcatatctcttttattctagcaccgataatctactgaaaagaagacacttagagctctgtctctttgtcaaagaagtcccagccgtcatccagaagctccttacgttcattaacagaggtaccggcggccgcgggcaactttattatacaaagttggcattataaaaaagcattgcttatcaatttgttgcaacgaacaggtcactatcagtcaaaataaaatcattatttggagctcccaattcgtaatcatggtcatagctgtttcctgtgtgaaattgttatccgctcacaattccacacaacatacgagccggaagcataaagtgtaaagcctggggtgcctaatgagtgagctaactcacattaattgcgttgcgctcactgcccgctttccagtcgggaaacctgtcgtgccagctgcattaatgaatcggccaacgcgcggggagaggcggtttgcgtattgggcgctcttccgcttcctcgctcactgactcgctgcgctcggtcgttcggctgcggcgagcggtatcagctcactcaaaggcggtaatacggttatccacagaatcaggggataacgcaggaaagaacatgtgagcaaaaggccagcaaaaggccaggaaccgtaaaaaggccgcgttgctggcgtttttccataggctccgcccccctgacgagcatcacaaaaatcgacgctcaagtcagaggtggcgaaacccgacaggactataaagataccaggcgtttccccctggaagctccctcgtgcgctctcctgttccgaccctgccgcttaccggatacctgtccgcctttctcccttcgggaagcgtggcgctttctcatagctcacgctgtaggtatctcagttcggtgtaggtcgttcgctccaagctgggctgtgtgcacgaaccccccgttcagcccgaccgctgcgccttatccggtaactatcgtcttgagtccaacccggtaagacacgacttatcgccactggcagcagccactggtaacaggattagcagagcgaggtatgtaggcggtgctacagagttcttgaagtggtggcctaactacggctacactagaagaacagtatttggtatctgcgctctgctgaagccagttaccttcggaaaaagagttggtagctcttgatccggcaaacaaaccaccgctggtagcggtggtttttttgtttgcaagcagcagattacgcgcagaaaaaaaggatctcaagaagatcctttgatcttttctacggggtctgacgctcagtggaacgaaaactcacgttaagggattttggtcatgagattatcaaaaaggatcttcacctagatccttttaaattaaaaatgaagttttaaatcaatctaaagtatatatgagtaaacttggtctgacagttaccaatgcttaatcagtgaggcacctatctcagcgatctgtctatttcgttcatccatagttgcctgactccccgtcgtgtagataactacgatacgggagggcttaccatctggccccagtgctgcaatgataccgcgagacccacgctcaccggctccagatttatcagcaataaaccagccagccggaagggccgagcgcagaagtggtcctgcaactttatccgcctccatccagtctattaattgttgccgggaagctagagtaagtagttcgccagttaatagtttgcgcaacgttgttgccattgctacaggcatcgtggtgtcacgctcgtcgtttggtatggcttcattcagctccggttcccaacgatcaaggcgagttacatgatcccccatgttgtgcaaaaaagcggttagctccttcggtcctccgatcgttgtcagaagtaagttggccgcagtgttatcactcatggttatggcagcactgcataattctcttactgtcatgccatccgtaagatgcttttctgtgactggtgagtactcaaccaagtcattctgagaatagtgtatgcggcgaccgagttgctcttgcccggcgtcaatacgggataataccgcgccacatagcagaactttaaaagtgctcatcattggaaaacgttcttcggggcgaaaactctcaaggatcttaccgctgttgagatccagttcgatgtaacccactcgtgcacccaactgatcttcagcatcttttactttcaccagcgtttctgggtgagcaaaaacaggaaggcaaaatgccgcaaaaaagggaataagggcgacacggaaatgttgaatactcatactcttcctttttcaatattattgaagcatttatcagggttattgtctcatgagcggatacatatttgaatgtatttagaaaaataaacaaataggggttccgcgcacatttccccgaaaagtgccacctgacgtctaagaaaccattattatcatgacattaacctataaaaataggcgtatcacgaggccctttcgtctcgcgcgtttcggtgatgacggtgaaaacctctgacacatgcagctcccggagacggtcacagcttgtctgtaagcggatgccgggagcagacaagcccgtcagggcgcgtcagcgggtgttggcgggtgtcggggctggcttaactatgcggcatcagagcagattgtactgagagtgcaccataaaattgtaaacgttaatattttgttaaaattcgcgttaaatttttgttaaatcagctcattttttaaccaataggccgaaatcggcaaaatcccttataaatcaaaagaatagc

SEQ ID NO: 119 - DNA, 5950 bp, Artificial Sequence
  plasmid UBIGMWUS
cccgtagaaaagatcaaaggatcttcttgagatcctttttttctgcgcgtaatctgctgcttgcaaacaaaaaaaccaccgctaccagcggtggtttgtttgccggatcaagagctaccaactctttttccgaaggtaactggcttcagcagagcgcagataccaaatactgtccttctagtgtagccgtagttaggccaccacttcaagaactctgtagcaccgcctacatacctcgctctgctaatcctgttaccagtggctgctgccagtggcgataagtcgtgtcttaccgggttggactcaagacgatagttaccggataaggcgcagcggtcgggctgaacggggggttcgtgcacacagcccagcttggagcgaacgacctacaccgaactgagatacctacagcgtgagcattgagaaagcgccacgcttcccgaagggagaaaggcggacaggtatccggtaagcggcagggtcggaacaggagagcgcacgagggagcttccagggggaaacgcctggtatctttatagtcctgtcgggtttcgccacctctgacttgagcgtcgatttttgtgatgctcgtcaggggggcggagcctatggaaaaacgccagcaacgcggcctttttacggttcctggccttttgctggccttttgctcacatgttctttcctgcgttatcccctgattctgtggataaccgtattaccgcctttgagtgagctgataccgctcgccgcagccgaacgaccgagcgcagcgagtcagtgagcgaggaagcggaagagcgcccaatacgcaaaccgcctctccccgcgcgttggccgattcattaatgcagctggcacgacaggtttcccgactggaaagcgggcagtgagcgcaacgcaattaatacgcgtaccgctagccaggaagagtttgtagaaacgcaaaaaggccatccgtcaggatggccttctgcttagtttgatgcctggcagtttatggcgggcgtcctgcccgccaccctccgggccgttgcttcacaacgttcaaatccgctcccggcggatttgtcctactcaggagagcgttcaccgacaaacaacagataaaacgaaaggcccagtcttccgactgagcctttcgttttatttgatgcctggcagttccctactctcgcgttaacgctagcatggatgttttcccagtcacgacgttgtaaaacgacggccagtcttaagctcgggccccaaataatgattttattttgactgatagtgacctgttcgttgcaacaaattgatgagcaatgcttttttataatgccaagtttgtacaaaaaagcaggctccggccagaatccggtaagtgactagggtcacatcgaattcccataggattggggccagaatggccgcggccgcatcaggatattcttgtttaagatgttgaactctatggaggtttgtatgaactgatgatctaggaccggataagttcccttcttcatagcgaacttattcaaagaatgttttgtgtatcattcttgttacattgttattaatgaaaaaatattattggtcattggactgaacacgagtgttaaatatggaccaggccccaaataagatccattgatatatgaattaaataacaagaataaatcgagtcaccaaaccacttgccttttttaacgagacttgttcaccaacttgatacaaaagtcattatcctatgcaaatcaataatcatacaaaaatatccaataacactaaaaaattaaaagaaatggataatttcacaatatgttatacgataaagaagttacttttccaagaaattcactgattttataagcccacttgcattagataaatggcaaaaaaaaacaaaaaggaaaagaaataaagcacgaagaattctagaaaatacgaaatacgcttcaatgcagtgggacccacggttcaattattgccaattttcagctccaccgtatatttaaaaaataaaacgataatgctaaaaaaatataaatcgtaacgatcgttaaatctcaacggctggatcttatgacgaccgttagaaattgtggttgtcgacgagtcagtaataaacggcgtcaaagtggttgcagccggcacacacgagtcgtgtttatcaactcaaagcacaaatacttttcctcaacctaaaaataaggcaattagccaaaaacaactttgcgtgtaaacaacgctcaatacacgtgtcattttattattagctattgcttcaccgccttagctttctcgtgacctagtcgtcctcgtcttttcttcttcttcttctataaaacaatacccaaagagctcttcttcttcacaattcagatttcaatttctcaaaatcttaaaaactttctctcaattctctctaccgtgatcaaggtaaatttctgtgttccttattctctcaaaatcttcgattttgttttcgttcgatcccaatttcgtatatgttctttggtttagattctgttaatcttagatcgaagacgattttctgggtttgatcgttagatatcatcttaattctcgattagggtttcatagatatcatccgatttgttcaaataatttgagttttgtcgaataattactcttcgatttgtgatttctatctagatctggtgttagtttctagtttgtgcgatcgaatttgtcgattaatctgagtttttctgattaacagccatggaacctcaacaacaacaacaacaagcacaagggagccaacaacaacaacaaaacgaggatggtggcagtggaaaaggggggtttctgagcaggcaaagtagtacacggtggactccaacaaacgaccagataagaatattgaaggaactttactacaacaatggaattagatccccgagtgcagagcagattcagaggatctctgctaggctgaggcagtacggtaagattgaaggcaagaatgtcttttattggttccagaaccacaaagctcgagaaaggcagaagaaaaggttcacttctgatcataatcataataatgtccccatgcaaagacccccaactaatccttctgctgcttggaaacctgatctagctgatcccattcacaccaccaagtattgtaacatctcttctactgcagggatctcttcggcatcatcttctgttgagatggttactgtgggacagatggggaattatgggtatggttctgtgcctatggagaaaagttttagggactgctcgatatcagctgggggtagcagtggccatgttggattaataaaccacaacttggggtgggttggtgtggacccatataattcctcaacctatgccaacttctttgacaaaataaggccaagtgatcaagaaacccttgaagaagaagcagagaacattggtgctactaagattgaaaccctccctttattccctatgcacggtgaggacatccacggctattgcaacctcaagtctaattcgtataactatgatggaaacggctggtatcatactgaagaagggttcaagaatgcttctcgtgcttccttggagctcagtctcaactcctacactcgcaggtctccagattatgcttaaagatccgtttttgtgatctgatgataagtggttggttcgtgtctcatgcacttgggaggtgatctatttcacctggtgtagtttgtgtttccgtcagttggaaaaacttatccctatcgatttcgttttcattttctgcttttcttttatgtaccttcgtttgggcttgtaacgggcctttgtatttcaactctcaataataatccaagtgcatgttaaacaatttgtcatctgtttcggctttgatatactactggtgaagatgggccgtactactgcatcacaacgaaaaataataataagatgaaaaacttgaagtggaaaaaaaaaaaaacttgaatgttcactactactcattgaccataatgtttaacatacatagctcaatagtatttttgtgaatatggcaacacaaacagtccaaaacaattgtctcttactataccaaaccaagggcgccgcttgtttgccactctttgtgtgcaatagtgtgattaccacatctccacattcaatatattccctgaattatctgacgattttgatggctcactgttttcccaagtcttgaattgtcttctgtgcgccagtcaaatgcatatgtgttgagtttatcttttaaatatcaagcttttgtttttaacttttgtttgtaaccaaaaactcacagtaggagtttgatcacataattttatgtttgcctttgcaatttctagtgagtctttgattaaaagcttgaaaagaaaatgcagccaagcttaccaagtaagttatgtgtattaaccagaggaagagagaatcttgcaaaatttcaacaaacacaaaaagaagtattactacgattggtggagaaagaaaacgattccaaatcttgaactgttgttgtaaaagcatagcagaaagtgggagacaaccgaaatagaaatgactataacttaatttaatgttatcattataatttcttctagcaaatatttagaaagtaaatatcacatcaacctttaatgtaattaagctttctctttttgattcatgtgagatgaaaagaaaaaaaagaagagaaaagtgtagaaaacacatcatttctaagctgaaggcggccgcggtcaccccatacgattggaagcttcccgggcacccagctttcttgtacaaagtgggcattataagaaagcattgcttatcaatttgttgcaacgaacaggtcactatcagtcaaaataaaatcattatttgccatccagctgatatcccctatagtgagtcgtattacatggtcatagctgtttcctggcagctctggcccgtgtctcaaaatctctgatgttacattgcacaagataaaaatatatcatcatgaacaataaaactgtctgcttacataaacagtaatacaaggggtgttatgagccatattcaacgggaaacgtcgaggccgcgattaaattccaacatggatgctgatttatatgggtataaatgggctcgcgataatgtcgggcaatcaggtgcgacaatctatcgcttgtatgggaagcccgatgcgccagagttgtttctgaaacatggcaaaggtagcgttgccaatgatgttacagatgagatggtcagactaaactggctgacggaatttatgcctcttccgaccatcaagcattttatccgtactcctgatgatgcatggttactcaccactgcgatccccggaaaaacagcattccaggtattagaagaatatcctgattcaggtgaaaatattgttgatgcgctggcagtgttcctgcgccggttgcattcgattcctgtttgtaattgtccttttaacagcgatcgcgtatttcgtctcgctcaggcgcaatcacgaatgaataacggtttggttgatgcgagtgattttgatgacgagcgtaatggctggcctgttgaacaagtctggaaagaaatgcataaacttttgccattctcaccggattcagtcgtcactcatggtgatttctcacttgataaccttatttttgacgaggggaaattaataggttgtattgatgttggacgagtcggaatcgcagaccgataccaggatcttgccatcctatggaactgcctcggtgagttttctccttcattacagaaacggctttttcaaaaatatggtattgataatcctgatatgaataaattgcagtttcatttgatgctcgatgagtttttctaatcagaattggttaattggttgtaacactggcagagcattacgctgacttgacgggacggcgcaagctcatgaccaaaatcccttaacgtgagttacgcgtcgttccactgagcgtcagac

SEQ ID NO: 120 - DNA, 5971 bp, Artificial Sequence
  plasmid UBIMTWUS
cccgtagaaaagatcaaaggatcttcttgagatcctttttttctgcgcgtaatctgctgcttgcaaacaaaaaaaccaccgctaccagcggtggtttgtttgccggatcaagagctaccaactctttttccgaaggtaactggcttcagcagagcgcagataccaaatactgtccttctagtgtagccgtagttaggccaccacttcaagaactctgtagcaccgcctacatacctcgctctgctaatcctgttaccagtggctgctgccagtggcgataagtcgtgtcttaccgggttggactcaagacgatagttaccggataaggcgcagcggtcgggctgaacggggggttcgtgcacacagcccagcttggagcgaacgacctacaccgaactgagatacctacagcgtgagcattgagaaagcgccacgcttcccgaagggagaaaggcggacaggtatccggtaagcggcagggtcggaacaggagagcgcacgagggagcttccagggggaaacgcctggtatctttatagtcctgtcgggtttcgccacctctgacttgagcgtcgatttttgtgatgctcgtcaggggggcggagcctatggaaaaacgccagcaacgcggcctttttacggttcctggccttttgctggccttttgctcacatgttctttcctgcgttatcccctgattctgtggataaccgtattaccgcctttgagtgagctgataccgctcgccgcagccgaacgaccgagcgcagcgagtcagtgagcgaggaagcggaagagcgcccaatacgcaaaccgcctctccccgcgcgttggccgattcattaatgcagctggcacgacaggtttcccgactggaaagcgggcagtgagcgcaacgcaattaatacgcgtaccgctagccaggaagagtttgtagaaacgcaaaaaggccatccgtcaggatggccttctgcttagtttgatgcctggcagtttatggcgggcgtcctgcccgccaccctccgggccgttgcttcacaacgttcaaatccgctcccggcggatttgtcctactcaggagagcgttcaccgacaaacaacagataaaacgaaaggcccagtcttccgactgagcctttcgttttatttgatgcctggcagttccctactctcgcgttaacgctagcatggatgttttcccagtcacgacgttgtaaaacgacggccagtcttaagctcgggccccaaataatgattttattttgactgatagtgacctgttcgttgcaacaaattgatgagcaatgcttttttataatgccaagtttgtacaaaaaagcaggctccggccagaatccggtaagtgactagggtcacatcgaattcccataggattggggccagaatggccgcggccgcatcaggatattcttgtttaagatgttgaactctatggaggtttgtatgaactgatgatctaggaccggataagttcccttcttcatagcgaacttattcaaagaatgttttgtgtatcattcttgttacattgttattaatgaaaaaatattattggtcattggactgaacacgagtgttaaatatggaccaggccccaaataagatccattgatatatgaattaaataacaagaataaatcgagtcaccaaaccacttgccttttttaacgagacttgttcaccaacttgatacaaaagtcattatcctatgcaaatcaataatcatacaaaaatatccaataacactaaaaaattaaaagaaatggataatttcacaatatgttatacgataaagaagttacttttccaagaaattcactgattttataagcccacttgcattagataaatggcaaaaaaaaacaaaaaggaaaagaaataaagcacgaagaattctagaaaatacgaaatacgcttcaatgcagtgggacccacggttcaattattgccaattttcagctccaccgtatatttaaaaaataaaacgataatgctaaaaaaatataaatcgtaacgatcgttaaatctcaacggctggatcttatgacgaccgttagaaattgtggttgtcgacgagtcagtaataaacggcgtcaaagtggttgcagccggcacacacgagtcgtgtttatcaactcaaagcacaaatacttttcctcaacctaaaaataaggcaattagccaaaaacaactttgcgtgtaaacaacgctcaatacacgtgtcattttattattagctattgcttcaccgccttagctttctcgtgacctagtcgtcctcgtcttttcttcttcttcttctataaaacaatacccaaagagctcttcttcttcacaattcagatttcaatttctcaaaatcttaaaaactttctctcaattctctctaccgtgatcaaggtaaatttctgtgttccttattctctcaaaatcttcgattttgttttcgttcgatcccaatttcgtatatgttctttggtttagattctgttaatcttagatcgaagacgattttctgggtttgatcgttagatatcatcttaattctcgattagggtttcatagatatcatccgatttgttcaaataatttgagttttgtcgaataattactcttcgatttgtgatttctatctagatctggtgttagtttctagtttgtgcgatcgaatttgtcgattaatctgagtttttctgattaacagccatggaacaacctcagcagcagcagcaaccacagacccaacagcactctccaaacaacggaatcatggggtccagacagagttccaccagatggaccccaacaaccgaccagatccgcattctcaaagacctctactacaacaacggaataaggtctccaagtgccgagcaaatccagaggatctccgcaaggctcagacagtacgggaagatcgagggcaagaacgtcttctactggttccaaaaccacaaagccagagagcgccagaaaaagcgcttcacctccgacgtcaacgtcgtccctatcatccagcgcgcccccaacaacaatactatcataagtgccgccaactggaagcctgaccaccacgaacaacagcagaacattaatgtccacacaaaccactccacatacaacatctcctccgctggcctcagttctgcttcctgctcctcagcagaaatggtcactgtggggcaaataggcaactacggctacgggtctgtcccaatggagaagtctttccgcgaatgcaccatctcagctggatgctcatcatcccaggttggctcaaccataaacccccacatcggctggatcggacaccacgtcgacccatattcaagtgcctacgctaacctcttcgagaaaatacgccccaacgaggagatcatggaagagtacgaccagggacaggaaaacggttccccagagatcgagacactcccactcttccctatgcacggagaagacatccacggagggtattgcaacctcaaatcaaattcctccaactacggaggatggtaccaggcagaagacgcagggttcatgtacggaagtcgtaccacttctctcgagctcagtctgaactcctacggatgcaggtcccccgactacgccaattaaggatccgtttttgtgatctgatgataagtggttggttcgtgtctcatgcacttgggaggtgatctatttcacctggtgtagtttgtgtttccgtcagttggaaaaacttatccctatcgatttcgttttcattttctgcttttcttttatgtaccttcgtttgggcttgtaacgggcctttgtatttcaactctcaataataatccaagtgcatgttaaacaatttgtcatctgtttcggctttgatatactactggtgaagatgggccgtactactgcatcacaacgaaaaataataataagatgaaaaacttgaagtggaaaaaaaaaaaaacttgaatgttcactactactcattgaccataatgtttaacatacatagctcaatagtatttttgtgaatatggcaacacaaacagtccaaaacaattgtctcttactataccaaaccaagggcgccgcttgtttgccactctttgtgtgcaatagtgtgattaccacatctccacattcaatatattccctgaattatctgacgattttgatggctcactgttttcccaagtcttgaattgtcttctgtgcgccagtcaaatgcatatgtgttgagtttatcttttaaatatcaagcttttgtttttaacttttgtttgtaaccaaaaactcacagtaggagtttgatcacataattttatgtttgcctttgcaatttctagtgagtctttgattaaaagcttgaaaagaaaatgcagccaagcttaccaagtaagttatgtgtattaaccagaggaagagagaatcttgcaaaatttcaacaaacacaaaaagaagtattactacgattggtggagaaagaaaacgattccaaatcttgaactgttgttgtaaaagcatagcagaaagtgggagacaaccgaaatagaaatgactataacttaatttaatgttatcattataatttcttctagcaaatatttagaaagtaaatatcacatcaacctttaatgtaattaagctttctctttttgattcatgtgagatgaaaagaaaaaaaagaagagaaaagtgtagaaaacacatcatttctaagctgaaggcggccgcggtcaccccatacgattggaagcttcccgggcacccagctttcttgtacaaagtgggcattataagaaagcattgcttatcaatttgttgcaacgaacaggtcactatcagtcaaaataaaatcattatttgccatccagctgatatcccctatagtgagtcgtattacatggtcatagctgtttcctggcagctctggcccgtgtctcaaaatctctgatgttacattgcacaagataaaaatatatcatcatgaacaataaaactgtctgcttacataaacagtaatacaaggggtgttatgagccatattcaacgggaaacgtcgaggccgcgattaaattccaacatggatgctgatttatatgggtataaatgggctcgcgataatgtcgggcaatcaggtgcgacaatctatcgcttgtatgggaagcccgatgcgccagagttgtttctgaaacatggcaaaggtagcgttgccaatgatgttacagatgagatggtcagactaaactggctgacggaatttatgcctcttccgaccatcaagcattttatccgtactcctgatgatgcatggttactcaccactgcgatccccggaaaaacagcattccaggtattagaagaatatcctgattcaggtgaaaatattgttgatgcgctggcagtgttcctgcgccggttgcattcgattcctgtttgtaattgtccttttaacagcgatcgcgtatttcgtctcgctcaggcgcaatcacgaatgaataacggtttggttgatgcgagtgattttgatgacgagcgtaatggctggcctgttgaacaagtctggaaagaaatgcataaacttttgccattctcaccggattcagtcgtcactcatggtgatttctcacttgataaccttatttttgacgaggggaaattaataggttgtattgatgttggacgagtcggaatcgcagaccgataccaggatcttgccatcctatggaactgcctcggtgagttttctccttcattacagaaacggctttttcaaaaatatggtattgataatcctgatatgaataaattgcagtttcatttgatgctcgatgagtttttctaatcagaattggttaattggttgtaacactggcagagcattacgctgacttgacgggacggcgcaagctcatgaccaaaatcccttaacgtgagttacgcgtcgttccactgagcgtcagac

SEQ ID NO: 121 - DNA, 5941 bp, Artificial Sequence
  plasmid UBILJWUS
cccgtagaaaagatcaaaggatcttcttgagatcctttttttctgcgcgtaatctgctgcttgcaaacaaaaaaaccaccgctaccagcggtggtttgtttgccggatcaagagctaccaactctttttccgaaggtaactggcttcagcagagcgcagataccaaatactgtccttctagtgtagccgtagttaggccaccacttcaagaactctgtagcaccgcctacatacctcgctctgctaatcctgttaccagtggctgctgccagtggcgataagtcgtgtcttaccgggttggactcaagacgatagttaccggataaggcgcagcggtcgggctgaacggggggttcgtgcacacagcccagcttggagcgaacgacctacaccgaactgagatacctacagcgtgagcattgagaaagcgccacgcttcccgaagggagaaaggcggacaggtatccggtaagcggcagggtcggaacaggagagcgcacgagggagcttccagggggaaacgcctggtatctttatagtcctgtcgggtttcgccacctctgacttgagcgtcgatttttgtgatgctcgtcaggggggcggagcctatggaaaaacgccagcaacgcggcctttttacggttcctggccttttgctggccttttgctcacatgttctttcctgcgttatcccctgattctgtggataaccgtattaccgcctttgagtgagctgataccgctcgccgcagccgaacgaccgagcgcagcgagtcagtgagcgaggaagcggaagagcgcccaatacgcaaaccgcctctccccgcgcgttggccgattcattaatgcagctggcacgacaggtttcccgactggaaagcgggcagtgagcgcaacgcaattaatacgcgtaccgctagccaggaagagtttgtagaaacgcaaaaaggccatccgtcaggatggccttctgcttagtttgatgcctggcagtttatggcgggcgtcctgcccgccaccctccgggccgttgcttcacaacgttcaaatccgctcccggcggatttgtcctactcaggagagcgttcaccgacaaacaacagataaaacgaaaggcccagtcttccgactgagcctttcgttttatttgatgcctggcagttccctactctcgcgttaacgctagcatggatgttttcccagtcacgacgttgtaaaacgacggccagtcttaagctcgggccccaaataatgattttattttgactgatagtgacctgttcgttgcaacaaattgatgagcaatgcttttttataatgccaagtttgtacaaaaaagcaggctccggccagaatccggtaagtgactagggtcacatcgaattcccataggattggggccagaatggccgcggccgcatcaggatattcttgtttaagatgttgaactctatggaggtttgtatgaactgatgatctaggaccggataagttcccttcttcatagcgaacttattcaaagaatgttttgtgtatcattcttgttacattgttattaatgaaaaaatattattggtcattggactgaacacgagtgttaaatatggaccaggccccaaataagatccattgatatatgaattaaataacaagaataaatcgagtcaccaaaccacttgccttttttaacgagacttgttcaccaacttgatacaaaagtcattatcctatgcaaatcaataatcatacaaaaatatccaataacactaaaaaattaaaagaaatggataatttcacaatatgttatacgataaagaagttacttttccaagaaattcactgattttataagcccacttgcattagataaatggcaaaaaaaaacaaaaaggaaaagaaataaagcacgaagaattctagaaaatacgaaatacgcttcaatgcagtgggacccacggttcaattattgccaattttcagctccaccgtatatttaaaaaataaaacgataatgctaaaaaaatataaatcgtaacgatcgttaaatctcaacggctggatcttatgacgaccgttagaaattgtggttgtcgacgagtcagtaataaacggcgtcaaagtggttgcagccggcacacacgagtcgtgtttatcaactcaaagcacaaatacttttcctcaacctaaaaataaggcaattagccaaaaacaactttgcgtgtaaacaacgctcaatacacgtgtcattttattattagctattgcttcaccgccttagctttctcgtgacctagtcgtcctcgtcttttcttcttcttcttctataaaacaatacccaaagagctcttcttcttcacaattcagatttcaatttctcaaaatcttaaaaactttctctcaattctctctaccgtgatcaaggtaaatttctgtgttccttattctctcaaaatcttcgattttgttttcgttcgatcccaatttcgtatatgttctttggtttagattctgttaatcttagatcgaagacgattttctgggtttgatcgttagatatcatcttaattctcgattagggtttcatagatatcatccgatttgttcaaataatttgagttttgtcgaataattactcttcgatttgtgatttctatctagatctggtgttagtttctagtttgtgcgatcgaatttgtcgattaatctgagtttttctgattaacagccatggaacaacctccccaacagcagcaacaaaacgaagacggaggcggatcaagtgggggaaaaggagggttcctcagtaggcagtccagtactaggtggacacccaccacagaccagattcgcatcctcaaggagctctactacaacaacggaatacgctcaccctccgcagaacagatccagaggatctccgcaagactcagacagtacggcaagatcgagggcaagaacgtcttctactggttccaaaaccacaaagcccgcgaaaggcagaagaagcgcttcaccagtgagacacacttgctgcccaacccaattcagcagcaacagcgcaacggaacaaacgcagcttggaagcagccagaggagcaacccatcatcaaccacaccaagtactcctccaacaacatatccgcacccgcagggattatcacaagtgccccatcttcttccgcagaaatagtctccgtggggcagatcggaaacttcggatacggatctctgccaatggagaagtccttcagggactgcagtatctcagccggaggtaacacaggatacgccgggtctgctattaaccacaacctcggatggatgggagtcgacccatactcctctgcttacaccaacttcttcgacaaaatacgcccaacagaggaggagactatggaggaagaaggacaggagaacggctcaccagaaatcgagaccctgcctttgttcccaatgcacggagaggacatccactccggctacttcaacctcaagagtaactcatcccactacgctggcggatggtaccaaactgaggaaggctacttcaacaacggatcacgcgccagtctggagctgtccctgaagtaccctgacttcgcttagggatccgtttttgtgatctgatgataagtggttggttcgtgtctcatgcacttgggaggtgatctatttcacctggtgtagtttgtgtttccgtcagttggaaaaacttatccctatcgatttcgttttcattttctgcttttcttttatgtaccttcgtttgggcttgtaacgggcctttgtatttcaactctcaataataatccaagtgcatgttaaacaatttgtcatctgtttcggctttgatatactactggtgaagatgggccgtactactgcatcacaacgaaaaataataataagatgaaaaacttgaagtggaaaaaaaaaaaaacttgaatgttcactactactcattgaccataatgtttaacatacatagctcaatagtatttttgtgaatatggcaacacaaacagtccaaaacaattgtctcttactataccaaaccaagggcgccgcttgtttgccactctttgtgtgcaatagtgtgattaccacatctccacattcaatatattccctgaattatctgacgattttgatggctcactgttttcccaagtcttgaattgtcttctgtgcgccagtcaaatgcatatgtgttgagtttatcttttaaatatcaagcttttgtttttaacttttgtttgtaaccaaaaactcacagtaggagtttgatcacataattttatgtttgcctttgcaatttctagtgagtctttgattaaaagcttgaaaagaaaatgcagccaagcttaccaagtaagttatgtgtattaaccagaggaagagagaatcttgcaaaatttcaacaaacacaaaaagaagtattactacgattggtggagaaagaaaacgattccaaatcttgaactgttgttgtaaaagcatagcagaaagtgggagacaaccgaaatagaaatgactataacttaatttaatgttatcattataatttcttctagcaaatatttagaaagtaaatatcacatcaacctttaatgtaattaagctttctctttttgattcatgtgagatgaaaagaaaaaaaagaagagaaaagtgtagaaaacacatcatttctaagctgaaggcggccgcggtcaccccatacgattggaagcttcccgggcacccagctttcttgtacaaagtgggcattataagaaagcattgcttatcaatttgttgcaacgaacaggtcactatcagtcaaaataaaatcattatttgccatccagctgatatcccctatagtgagtcgtattacatggtcatagctgtttcctggcagctctggcccgtgtctcaaaatctctgatgttacattgcacaagataaaaatatatcatcatgaacaataaaactgtctgcttacataaacagtaatacaaggggtgttatgagccatattcaacgggaaacgtcgaggccgcgattaaattccaacatggatgctgatttatatgggtataaatgggctcgcgataatgtcgggcaatcaggtgcgacaatctatcgcttgtatgggaagcccgatgcgccagagttgtttctgaaacatggcaaaggtagcgttgccaatgatgttacagatgagatggtcagactaaactggctgacggaatttatgcctcttccgaccatcaagcattttatccgtactcctgatgatgcatggttactcaccactgcgatccccggaaaaacagcattccaggtattagaagaatatcctgattcaggtgaaaatattgttgatgcgctggcagtgttcctgcgccggttgcattcgattcctgtttgtaattgtccttttaacagcgatcgcgtatttcgtctcgctcaggcgcaatcacgaatgaataacggtttggttgatgcgagtgattttgatgacgagcgtaatggctggcctgttgaacaagtctggaaagaaatgcataaacttttgccattctcaccggattcagtcgtcactcatggtgatttctcacttgataaccttatttttgacgaggggaaattaataggttgtattgatgttggacgagtcggaatcgcagaccgataccaggatcttgccatcctatggaactgcctcggtgagttttctccttcattacagaaacggctttttcaaaaatatggtattgataatcctgatatgaataaattgcagtttcatttgatgctcgatgagtttttctaatcagaattggttaattggttgtaacactggcagagcattacgctgacttgacgggacggcgcaagctcatgaccaaaatcccttaacgtgagttacgcgtcgttccactgagcgtcagac

SEQ ID NO: 122 - DNA, 5932 bp, Artificial Sequence
  plasmid UBIPVWUS
cccgtagaaaagatcaaaggatcttcttgagatcctttttttctgcgcgtaatctgctgcttgcaaacaaaaaaaccaccgctaccagcggtggtttgtttgccggatcaagagctaccaactctttttccgaaggtaactggcttcagcagagcgcagataccaaatactgtccttctagtgtagccgtagttaggccaccacttcaagaactctgtagcaccgcctacatacctcgctctgctaatcctgttaccagtggctgctgccagtggcgataagtcgtgtcttaccgggttggactcaagacgatagttaccggataaggcgcagcggtcgggctgaacggggggttcgtgcacacagcccagcttggagcgaacgacctacaccgaactgagatacctacagcgtgagcattgagaaagcgccacgcttcccgaagggagaaaggcggacaggtatccggtaagcggcagggtcggaacaggagagcgcacgagggagcttccagggggaaacgcctggtatctttatagtcctgtcgggtttcgccacctctgacttgagcgtcgatttttgtgatgctcgtcaggggggcggagcctatggaaaaacgccagcaacgcggcctttttacggttcctggccttttgctggccttttgctcacatgttctttcctgcgttatcccctgattctgtggataaccgtattaccgcctttgagtgagctgataccgctcgccgcagccgaacgaccgagcgcagcgagtcagtgagcgaggaagcggaagagcgcccaatacgcaaaccgcctctccccgcgcgttggccgattcattaatgcagctggcacgacaggtttcccgactggaaagcgggcagtgagcgcaacgcaattaatacgcgtaccgctagccaggaagagtttgtagaaacgcaaaaaggccatccgtcaggatggccttctgcttagtttgatgcctggcagtttatggcgggcgtcctgcccgccaccctccgggccgttgcttcacaacgttcaaatccgctcccggcggatttgtcctactcaggagagcgttcaccgacaaacaacagataaaacgaaaggcccagtcttccgactgagcctttcgttttatttgatgcctggcagttccctactctcgcgttaacgctagcatggatgttttcccagtcacgacgttgtaaaacgacggccagtcttaagctcgggccccaaataatgattttattttgactgatagtgacctgttcgttgcaacaaattgatgagcaatgcttttttataatgccaagtttgtacaaaaaagcaggctccggccagaatccggtaagtgactagggtcacatcgaattcccataggattggggccagaatggccgcggccgcatcaggatattcttgtttaagatgttgaactctatggaggtttgtatgaactgatgatctaggaccggataagttcccttcttcatagcgaacttattcaaagaatgttttgtgtatcattcttgttacattgttattaatgaaaaaatattattggtcattggactgaacacgagtgttaaatatggaccaggccccaaataagatccattgatatatgaattaaataacaagaataaatcgagtcaccaaaccacttgccttttttaacgagacttgttcaccaacttgatacaaaagtcattatcctatgcaaatcaataatcatacaaaaatatccaataacactaaaaaattaaaagaaatggataatttcacaatatgttatacgataaagaagttacttttccaagaaattcactgattttataagcccacttgcattagataaatggcaaaaaaaaacaaaaaggaaaagaaataaagcacgaagaattctagaaaatacgaaatacgcttcaatgcagtgggacccacggttcaattattgccaattttcagctccaccgtatatttaaaaaataaaacgataatgctaaaaaaatataaatcgtaacgatcgttaaatctcaacggctggatcttatgacgaccgttagaaattgtggttgtcgacgagtcagtaataaacggcgtcaaagtggttgcagccggcacacacgagtcgtgtttatcaactcaaagcacaaatacttttcctcaacctaaaaataaggcaattagccaaaaacaactttgcgtgtaaacaacgctcaatacacgtgtcattttattattagctattgcttcaccgccttagctttctcgtgacctagtcgtcctcgtcttttcttcttcttcttctataaaacaatacccaaagagctcttcttcttcacaattcagatttcaatttctcaaaatcttaaaaactttctctcaattctctctaccgtgatcaaggtaaatttctgtgttccttattctctcaaaatcttcgattttgttttcgttcgatcccaatttcgtatatgttctttggtttagattctgttaatcttagatcgaagacgattttctgggtttgatcgttagatatcatcttaattctcgattagggtttcatagatatcatccgatttgttcaaataatttgagttttgtcgaataattactcttcgatttgtgatttctatctagatctggtgttagtttctagtttgtgcgatcgaatttgtcgattaatctgagtttttctgattaacagccatggaaccacagcagccccagggcagtcaaccaaacgaggacggtggaagtgggaaaggcggatttctctccagacagtcctccactaggtggactccaaccactgaccagatcagaatactcaaagacctctactacaacaacggaatcagatccccttccgcagaacagatccaaaggatctccgctaggctcagacagtacgggaagatcgagggcaagaacgtcttctactggttccaaaaccacaaggccagggagagacagaagaagaggttcacctccgacaacgtccccatgcaaagacctgcaccaacaaatgctgcacctccttggaaacccgaccaagaccccattcacaccaagtactccaacatctcctccacaggaatctccagtgcatcctcctcctcagtcgagatgatcaccgtcggacaaatggggaactacgggtacggaagtgtgccaatggaaaagtccttcagagactgctccatatccgccggaggatcttccggtcatgttggaataaaccacaacctcggctgggtgggagtcgatccttactcttctgcatacgccaacttcttcgataaaataagaccaaacgaagagaccctcgaggaagaagaagaggaggaggaggaggaagaagaagaggacggaggagcagaaattgagaccctccccctgttcccaatgcacggagaggacattcacggctactgcaacctcaagtccaacagttacaactacgacggcaacggctggtatcacagtgaggatggcttcaaaaacggcagtagggcctccctcgagctctccctcaactcttacaccagaagatcccccgacttcgcatagatgcatagatccgtttttgtgatctgatgataagtggttggttcgtgtctcatgcacttgggaggtgatctatttcacctggtgtagtttgtgtttccgtcagttggaaaaacttatccctatcgatttcgttttcattttctgcttttcttttatgtaccttcgtttgggcttgtaacgggcctttgtatttcaactctcaataataatccaagtgcatgttaaacaatttgtcatctgtttcggctttgatatactactggtgaagatgggccgtactactgcatcacaacgaaaaataataataagatgaaaaacttgaagtggaaaaaaaaaaaaacttgaatgttcactactactcattgaccataatgtttaacatacatagctcaatagtatttttgtgaatatggcaacacaaacagtccaaaacaattgtctcttactataccaaaccaagggcgccgcttgtttgccactctttgtgtgcaatagtgtgattaccacatctccacattcaatatattccctgaattatctgacgattttgatggctcactgttttcccaagtcttgaattgtcttctgtgcgccagtcaaatgcatatgtgttgagtttatcttttaaatatcaagcttttgtttttaacttttgtttgtaaccaaaaactcacagtaggagtttgatcacataattttatgtttgcctttgcaatttctagtgagtctttgattaaaagcttgaaaagaaaatgcagccaagcttaccaagtaagttatgtgtattaaccagaggaagagagaatcttgcaaaatttcaacaaacacaaaaagaagtattactacgattggtggagaaagaaaacgattccaaatcttgaactgttgttgtaaaagcatagcagaaagtgggagacaaccgaaatagaaatgactataacttaatttaatgttatcattataatttcttctagcaaatatttagaaagtaaatatcacatcaacctttaatgtaattaagctttctctttttgattcatgtgagatgaaaagaaaaaaaagaagagaaaagtgtagaaaacacatcatttctaagctgaaggcggccgcggtcaccccatacgattggaagcttcccgggcacccagctttcttgtacaaagtgggcattataagaaagcattgcttatcaatttgttgcaacgaacaggtcactatcagtcaaaataaaatcattatttgccatccagctgatatcccctatagtgagtcgtattacatggtcatagctgtttcctggcagctctggcccgtgtctcaaaatctctgatgttacattgcacaagataaaaatatatcatcatgaacaataaaactgtctgcttacataaacagtaatacaaggggtgttatgagccatattcaacgggaaacgtcgaggccgcgattaaattccaacatggatgctgatttatatgggtataaatgggctcgcgataatgtcgggcaatcaggtgcgacaatctatcgcttgtatgggaagcccgatgcgccagagttgtttctgaaacatggcaaaggtagcgttgccaatgatgttacagatgagatggtcagactaaactggctgacggaatttatgcctcttccgaccatcaagcattttatccgtactcctgatgatgcatggttactcaccactgcgatccccggaaaaacagcattccaggtattagaagaatatcctgattcaggtgaaaatattgttgatgcgctggcagtgttcctgcgccggttgcattcgattcctgtttgtaattgtccttttaacagcgatcgcgtatttcgtctcgctcaggcgcaatcacgaatgaataacggtttggttgatgcgagtgattttgatgacgagcgtaatggctggcctgttgaacaagtctggaaagaaatgcataaacttttgccattctcaccggattcagtcgtcactcatggtgatttctcacttgataaccttatttttgacgaggggaaattaataggttgtattgatgttggacgagtcggaatcgcagaccgataccaggatcttgccatcctatggaactgcctcggtgagttttctccttcattacagaaacggctttttcaaaaatatggtattgataatcctgatatgaataaattgcagtttcatttgatgctcgatgagtttttctaatcagaattggttaattggttgtaacactggcagagcattacgctgacttgacgggacggcgcaagctcatgaccaaaatcccttaacgtgagttacgcgtcgttccactgagcgtcagac

SEQ ID NO: 123 - DNA, 5992 bp, Artificial Sequence
  plasmid UBIPYWUS
cccgtagaaaagatcaaaggatcttcttgagatcctttttttctgcgcgtaatctgctgcttgcaaacaaaaaaaccaccgctaccagcggtggtttgtttgccggatcaagagctaccaactctttttccgaaggtaactggcttcagcagagcgcagataccaaatactgtccttctagtgtagccgtagttaggccaccacttcaagaactctgtagcaccgcctacatacctcgctctgctaatcctgttaccagtggctgctgccagtggcgataagtcgtgtcttaccgggttggactcaagacgatagttaccggataaggcgcagcggtcgggctgaacggggggttcgtgcacacagcccagcttggagcgaacgacctacaccgaactgagatacctacagcgtgagcattgagaaagcgccacgcttcccgaagggagaaaggcggacaggtatccggtaagcggcagggtcggaacaggagagcgcacgagggagcttccagggggaaacgcctggtatctttatagtcctgtcgggtttcgccacctctgacttgagcgtcgatttttgtgatgctcgtcaggggggcggagcctatggaaaaacgccagcaacgcggcctttttacggttcctggccttttgctggccttttgctcacatgttctttcctgcgttatcccctgattctgtggataaccgtattaccgcctttgagtgagctgataccgctcgccgcagccgaacgaccgagcgcagcgagtcagtgagcgaggaagcggaagagcgcccaatacgcaaaccgcctctccccgcgcgttggccgattcattaatgcagctggcacgacaggtttcccgactggaaagcgggcagtgagcgcaacgcaattaatacgcgtaccgctagccaggaagagtttgtagaaacgcaaaaaggccatccgtcaggatggccttctgcttagtttgatgcctggcagtttatggcgggcgtcctgcccgccaccctccgggccgttgcttcacaacgttcaaatccgctcccggcggatttgtcctactcaggagagcgttcaccgacaaacaacagataaaacgaaaggcccagtcttccgactgagcctttcgttttatttgatgcctggcagttccctactctcgcgttaacgctagcatggatgttttcccagtcacgacgttgtaaaacgacggccagtcttaagctcgggccccaaataatgattttattttgactgatagtgacctgttcgttgcaacaaattgatgagcaatgcttttttataatgccaagtttgtacaaaaaagcaggctccggccagaatccggtaagtgactagggtcacatcgaattcccataggattggggccagaatggccgcggccgcatcaggatattcttgtttaagatgttgaactctatggaggtttgtatgaactgatgatctaggaccggataagttcccttcttcatagcgaacttattcaaagaatgttttgtgtatcattcttgttacattgttattaatgaaaaaatattattggtcattggactgaacacgagtgttaaatatggaccaggccccaaataagatccattgatatatgaattaaataacaagaataaatcgagtcaccaaaccacttgccttttttaacgagacttgttcaccaacttgatacaaaagtcattatcctatgcaaatcaataatcatacaaaaatatccaataacactaaaaaattaaaagaaatggataatttcacaatatgttatacgataaagaagttacttttccaagaaattcactgattttataagcccacttgcattagataaatggcaaaaaaaaacaaaaaggaaaagaaataaagcacgaagaattctagaaaatacgaaatacgcttcaatgcagtgggacccacggttcaattattgccaattttcagctccaccgtatatttaaaaaataaaacgataatgctaaaaaaatataaatcgtaacgatcgttaaatctcaacggctggatcttatgacgaccgttagaaattgtggttgtcgacgagtcagtaataaacggcgtcaaagtggttgcagccggcacacacgagtcgtgtttatcaactcaaagcacaaatacttttcctcaacctaaaaataaggcaattagccaaaaacaactttgcgtgtaaacaacgctcaatacacgtgtcattttattattagctattgcttcaccgccttagctttctcgtgacctagtcgtcctcgtcttttcttcttcttcttctataaaacaatacccaaagagctcttcttcttcacaattcagatttcaatttctcaaaatcttaaaaactttctctcaattctctctaccgtgatcaaggtaaatttctgtgttccttattctctcaaaatcttcgattttgttttcgttcgatcccaatttcgtatatgttctttggtttagattctgttaatcttagatcgaagacgattttctgggtttgatcgttagatatcatcttaattctcgattagggtttcatagatatcatccgatttgttcaaataatttgagttttgtcgaataattactcttcgatttgtgatttctatctagatctggtgttagtttctagtttgtgcgatcgaatttgtcgattaatctgagtttttctgattaacagccatggaaacagcacagcaccagcagaacaaccaacagcactacctccaccaacacctctccatcggacaaggaacaaacatcgaggacggcagtaacaagaacaactcctccaacttcatgtgcaggcaaaatagtacccgctggacaccaaccactgaccagatcaggatattaaaggacctctactacaacaacggagtcagatcacctaccgctgaacagatccagagaatctccgccaagctcaggcagtacggcaagatcgagggcaagaacgtcttctactggttccagaaccataaagcccgcgagagacaaaagaagcgcctcatcgccgcagccaccaccgataacactaacctcccaatgcagatgcagttccagagaggagtctggagatcctctgcagacgaccccatccaccacaagtatactaatccaggagtgcactgcccttcagcttcttcccacggagttctcgcagtcggacagaacggcaatcacggatacggagccttggcaatggaaaaatccttccgcgactgctccatcagtccaggcagttccatgtcacaccaccaccaccaaaacttcgcttgggcaggagtcgatccttattcctcaaccacaacctaccctttcctcgagaagaccaagcacttcgagaatgaaaccctcgaagctgatgaagagcagcaagaggaggaccaggagaactactactaccaaaggaccacctctgccatcgaaaccctgcctctcttccctatgcacgaggagaacatctcctccttctgcaacctcaagcaccaggagtcatccggaggattctacaccgagtggtacagagcagacgacaacctcgcagcagccagagcttccctcgagctctccttgaactccttcatcggcaactcctcctagcagctgagatccgtttttgtgatctgatgataagtggttggttcgtgtctcatgcacttgggaggtgatctatttcacctggtgtagtttgtgtttccgtcagttggaaaaacttatccctatcgatttcgttttcattttctgcttttcttttatgtaccttcgtttgggcttgtaacgggcctttgtatttcaactctcaataataatccaagtgcatgttaaacaatttgtcatctgtttcggctttgatatactactggtgaagatgggccgtactactgcatcacaacgaaaaataataataagatgaaaaacttgaagtggaaaaaaaaaaaaacttgaatgttcactactactcattgaccataatgtttaacatacatagctcaatagtatttttgtgaatatggcaacacaaacagtccaaaacaattgtctcttactataccaaaccaagggcgccgcttgtttgccactctttgtgtgcaatagtgtgattaccacatctccacattcaatatattccctgaattatctgacgattttgatggctcactgttttcccaagtcttgaattgtcttctgtgcgccagtcaaatgcatatgtgttgagtttatcttttaaatatcaagcttttgtttttaacttttgtttgtaaccaaaaactcacagtaggagtttgatcacataattttatgtttgcctttgcaatttctagtgagtctttgattaaaagcttgaaaagaaaatgcagccaagcttaccaagtaagttatgtgtattaaccagaggaagagagaatcttgcaaaatttcaacaaacacaaaaagaagtattactacgattggtggagaaagaaaacgattccaaatcttgaactgttgttgtaaaagcatagcagaaagtgggagacaaccgaaatagaaatgactataacttaatttaatgttatcattataatttcttctagcaaatatttagaaagtaaatatcacatcaacctttaatgtaattaagctttctctttttgattcatgtgagatgaaaagaaaaaaaagaagagaaaagtgtagaaaacacatcatttctaagctgaaggcggccgcggtcaccccatacgattggaagcttcccgggcacccagctttcttgtacaaagtgggcattataagaaagcattgcttatcaatttgttgcaacgaacaggtcactatcagtcaaaataaaatcattatttgccatccagctgatatcccctatagtgagtcgtattacatggtcatagctgtttcctggcagctctggcccgtgtctcaaaatctctgatgttacattgcacaagataaaaatatatcatcatgaacaataaaactgtctgcttacataaacagtaatacaaggggtgttatgagccatattcaacgggaaacgtcgaggccgcgattaaattccaacatggatgctgatttatatgggtataaatgggctcgcgataatgtcgggcaatcaggtgcgacaatctatcgcttgtatgggaagcccgatgcgccagagttgtttctgaaacatggcaaaggtagcgttgccaatgatgttacagatgagatggtcagactaaactggctgacggaatttatgcctcttccgaccatcaagcattttatccgtactcctgatgatgcatggttactcaccactgcgatccccggaaaaacagcattccaggtattagaagaatatcctgattcaggtgaaaatattgttgatgcgctggcagtgttcctgcgccggttgcattcgattcctgtttgtaattgtccttttaacagcgatcgcgtatttcgtctcgctcaggcgcaatcacgaatgaataacggtttggttgatgcgagtgattttgatgacgagcgtaatggctggcctgttgaacaagtctggaaagaaatgcataaacttttgccattctcaccggattcagtcgtcactcatggtgatttctcacttgataaccttatttttgacgaggggaaattaataggttgtattgatgttggacgagtcggaatcgcagaccgataccaggatcttgccatcctatggaactgcctcggtgagttttctccttcattacagaaacggctttttcaaaaatatggtattgataatcctgatatgaataaattgcagtttcatttgatgctcgatgagtttttctaatcagaattggttaattggttgtaacactggcagagcattacgctgacttgacgggacggcgcaagctcatgaccaaaatcccttaacgtgagttacgcgtcgttccactgagcgtcagac

SEQ ID NO: 124 - DNA, 2000 bp, Glycine max
acatagccccaaaaccactattgaatatcaattagaaattggaagggttacttaaccttccattaaacatacaagtttccccatgataatagggatcaaaaataatgatcagggattcattccaaagaaaagtttacaaaatcaattttcgctcattttataggagttaaacccatttttaagccaaaaacctttacgtataaacaacattttaaaagttatttttcaataaaagcatcttttagagtttactgtttttatggcatattcaccccagtacagtttatattgctttcgtttaaacaggagttcatgaatttctaaaaaaaatgtttatgatacttgtcatttcgattgttcatatggtgcctgtcagataattaatgtctccgtggtgtttaactgttaagtagttgattttttgtcatgtaatcttgtaaatgacaattctatcgttaatcaaacaatccgtatacacacacacacacggagaaactagtgtgggtttgaccaaggaccctgaattcttcttctttgtataaggtcaggcaagtggtagagttcgaatagtaagttttgaagtttaaagcttgtacacaaaatatatatatatatatattgataaagaatggatataattgttttacaacgtgcagcgagggaacccttcaatacgcacctctctaccaagtctaacttaaaaacacagaattatcaaacacccaatttatgtgttagaatgtcttgcttttcgctactactattgtctggtgggcatgatgattttctcacaaaataattggaatattccacttatctctggctgatcttttttcttacatttaagacaatagagagtattaaatttgttataatcgtaatatttatatattaaatagtatttatggtatatttaaatatatatatatatagaatattattttatatatgcatattatagttattgttaattcagcatgtgttctggtttctgaaataaaataaaaaaacaaaaatttgaaaaatagaaactagaataaaaaaaatcaataaaaaggacctcacttattattttgactgttactaattacggaaataagttacttaaatgtattaaattaatttttgaaaattaatgcattaaagaaacttatttaatgtattaaataagtatttaatgcatttcaggaaaaagcatttaatgtattaaatacagtttagaaattaatttttgtttcattttttatttataaaattatgttttctttttacatatttgtaaaattatttggagagatgaaaaaaaatgtgtaaaaagaaagagtctaccaacaagtagttagtccaaatagtattgaattcaaattttttaaataaagttttgttaaaattaattatgaataaaattgatagataattctaacataattacacaaaaaaatctttaatcataatactccctttagacctcaaatgtaaaaaaaataaaaaaaaaatcaattgtgttagattaaaatataaacaaattttaattaactatcacctactttatcacctacttaatgatgtattttcaaaacatcattcgtttaattgagttttatttttaataatcttatttttttttcttatataatcaatatagatgatattttaaggaataaattaactttttattgaaattatcaaaattaaataatattaactaattttttgtctaatggttgagtccagagagagtaatatttgtgggtggagttttactggtggatgtggacaggtgtgagccacatgttaccatgcagtgagtcagaaaaaagaagtggcaggatatccggcgggttcacggcttggaagttgcaataaatattaaatgaggatgcagatattcttcttctgtcggtggtatgatatatatatatatataaggccgggcagaaaggaaaggaaatactattacatagcagaagcaaagaaaatactattactagctaatgagt

SEQ ID NO: 125 - DNA, 1500 bp, Arabidopsis thaliana
tttattttatatgtttaattttatagaatctaactagcttattttgagattaaattgtttagttacttttataacagtataaatgtataatgaggacctaagaatgtagtcctgtaatgttcttgctattctacttaatctcatcaccaatcaaccatcaaaagaagctagtactaataaaacctgcaggtattcgaataataattaagctcaaacactatactaatttatggaggattatatattcaatgaattaggaacctcatgatggacattattgactgatataatgtgtatactaattgtgagtatttaaaaaccatacaaagcatttatatgtccacatatattggacacacatgcaatcaatgttcaatatgctccacacacagaaataaaaatactctttctgatcatatgatacatcatacatatactaaaaaaatctaaaatgaactataaccacaagcatatataataacaatgaaatggtaatgtttcttcatttttatttgttcaaattcttattcggttgttttttcttaccctacgagaatccgtgaggtcaaagggaaacagtgattttttttttgtattttgttttttaaattgatgaactgtaaaactctctctctagaaaaatatataagtagtagtatgaattttctctcactaaaagcattaatggacctttcgataatcataaatgcaatgcaccctctctatgcatttcgcaataactccttttccttctgccacatcctcttcctcacctctttctcttcttccctttctcctaagttcctcctccaccaaattctccatttatttcgttaactatcctccatttgttttcttctgaagagtgatatattctacctttctctggttaaagaaactccctgaatccaccggttatgtcttgaccggctataagcctataaactgatgccctaagacacctttttaggtttctcaataattctccgcatctatcttttcttctccacaagtaagagaaccagaaaaccagagaagaagccgagctagctagggtttcattgtgtgcacaaaagtaagatctctctctctaaccaatacttgtgtaatttgtctttgtttctttgagcaaatattgcatgtttgttcatattagccggatccgttttatattttttcatgatctacattttatctttattttgtttgtaaattaatgagttttttttttttttttctgtttttgtcacgatctaaaaaacaagcgttacaaagaagaagaaaaacctttttggagttagaagtgtaaaaggggtttcagtttgacgaattttccttagtagttgtgtaaaaaaaggccattgacttaatgtcaactctatatatctacacatttttttattaattagtttttgtttttttcccacttcatttacctttagtcaatgaatttttactgaaaacgttttttcaaggtcaatttcactgagttaaaaaaaa

SEQ ID NO: 126 - DNA, 1130 bp, Arabidopsis thaliana
atatcggttgttgacgattaaccatgcaaaaaagaaacattaattgcgaatgtaaataacaaaacatgtaactcttgtagatatacatgtatcgacatttaaacccgaatatatatgtatacctataatttctctgattttcacgctacctgccacgtacatgggtgataggtccaaactcacaagtaaaagtttacgtacagtgaattcgtctttttgggtataaacgtacatttaatttacacgtaagaaaggattaccaattctttcatttatggtaccagacagagttaaggcaaacaagagaaacatatagagttttgatatgttttcttggataaatattaaattgatgcaatatttagggatggacacaaggtaatatatgccttttaaggtatatgtgctatatgaatcgtttcgcatgggtactaaaattatttgtccttactttatataaacaaattccaacaaaatcaagtttttgctaaaactagtttatttgcgggttatttaattacctatcatattacttgtaatatcattcgtatgttaacgggtaaaccaaaccaaaccggatattgaactattaaaaatcttgtaaatttgacacaaactaatgaatatctaaattatgttactgctatgataacgaccatttttgtttttgagaaccataatataaattacaggtacgtgacaagtactaagtatttatatccacctttagtcacagtaccaatattgcgcctaccgggcaacgtgaacgtgatcatcaaatcaaagtagttaccaaacgctttgatctcgataaaactaaaagctgacacgtcttgctgtttcttaatttatttctcttacaacgacaattttgagaaatatgaaatttttatatcgaaagggaacagtccttatcatttgctcccatcacttgcttttgtctagttacaactggaaatcgaagagaagtattacaaaaacatttttctcgtcatttataaaaaaatgacaaaaaattaaatagagagcaaagcaagagcgttgggtgacgttggtctcttcattaactcctctcatctaccccttcctctgttcgcctttatatccttcaccttccctctctcatcttc

SEQ ID NO: 127 - DNA, 663 bp, Gnetum gnemon
atggaagaaaacagcaacagcagcagaagcagcaacagcggcgcacgttggaatccgacgccggagcagctgagcattctgaaagagctgtatcatggccgcggaatcaggtcgcccagcgccgaacagatccaccatatctcatggaaactcagctcctacggcaaaatcgagggcaagaacgtcttctactggttccagaaccataaggcccgccagcgtcaaaaagagcgtctcggttccgtcatgcctgcttctgcttcttcttcttcttttgcatctccttctcagggagctgtcggcattcgaaggggaagtacggtgctatgtcttaaggaaacttcagcttcatcttcatcttattcttctgttccgcgttcggtatcagctgtgcgccagtgtgctgcatctcgtgactgtggcttgcaccatgatctgacaactctggagctgtttcccctgcaccgtgaaagtagaatagacgctggggaggaagacgaggagcaacaggaggtggtggtgctagataataataataacacctggacaaggcaccaaaatgtaaatgtgaatcatgcaaataatgacgatgagccacagcatggtcatgggcagattgatattgatgtagggcttcgtctttgcctcggtggatttcgctga

SEQ ID NO: 128 - protein, 220 aa, Gnetum gnemon
MEENSNSSRSSNSGARWNPTPEQLSILKELYHGRGIRSPSAEQIHHISWKLSSYGKIEGKNVFYWFQNHKARQRQKERLGSVMPASASSSSFASPSQGAVGIRRGSTVLCLKETSASSSSYSSVPRSVSAVRQCAASRDCGLHHDLTTLELFPLHRESRIDAGEEDEEQQEVVVLDNNNNTWTRHQNVNVNHANNDDEPQHGHGQIDIDVGLRLCLGGFR

SEQ ID NO: 129 - DNA, 987 bp, Malus domestica
atggaccctcaacagaacccaaatgaagtacaagaaggaggcaacaggcaggggggtggaatcatgtgcaggcaaagcagtacgcggtggacacccacaactgatcagataaaaatcttgaaggacctttactacaacaatggcattaggtcacccagcgctgagcagattcagaggatctctgctaagctgcgacagttcggcaagatcgaaggcaagaacgttttctattggtttcagaaccacaaagctcgtgagaggcagaagaaaagattcacttcttcttctgctcctgatcaccatcatcatgcagcaccaccagtgccagctgtaccaccagaatccaataatatcaggcaaagatcatcaggggttgggattgatattaatgcaactgctgctgctgcttatgaacaagcacccattaatcaccaccgcaagtattccaacatttctgctccaccagccgggttttcttctgcatcttcttcttcagttggtgtgaatgtttctgttggggcacagatgggaaactatgggtatggatccattgctatggagaagagctttagggagtgctcaatatcatctggaggaagtactagcactggtcatgtgggtggatctaattataatacttttaatcacaactatggatcatgggttggtgttgatccatattcctcgccctacactatctttgacaagaaatcctcatcaaaaccagtgtttggtgaccaggaaaatatgacggaagaagaatactacaatctgcaagcttcccaagagattgagactctcccactcttccccatgcacggtgaagacattcatggctttggcaacatcaagtcatcctctatggatggctactactccggctggtacaggtccgatggcggcaacgatggtggctctcgcacttcccttgagcttagcctcaattcctacggtcacatgacccatgattacttcagatcatattga

SEQ ID NO: 130 - protein, 328 aa, Malus domestica
MDPQQNPNEVQEGGNRQGGGIMCRQSSTRWTPTTDQIKILKDLYYNNGIRSPSAEQIQRISAKLRQFGKIEGKNVFYWFQNHKARERQKKRFTSSSAPDHHHHAAPPVPAVPPESNNIRQRSSGVGIDINATAAAAYEQAPINHHRKYSNISAPPAGFSSASSSSVGVNVSVGAQMGNYGYGSIAMEKSFRECSISSGGSTSTGHVGGSNYNTFNHNYGSWVGVDPYSSPYTIFDKKSSSKPVFGDQENMTEEEYYNLQASQEIETLPLFPMHGEDIHGFGNIKSSSMDGYYSGWYRSDGGNDGGSRTSLELSLNSYGHMTHDYFRSY

SEQ ID NO: 131 - DNA, 867 bp, Manihot esculenta
atggaacctcaacaacaacagcagcagcagcaaaaccaacaacaaccaaacgatgacaatagcagcggtgccaaaggaaactttctttgcaggcaaagcagtactaggtggactcccacaactgaccaaataagaatattgaaggacctttactacaacagtggagttaggtccccaagtgcagagcagattcagaggatatctgctaggcttagacagtacggtaagattgaaggcaagaatgtcttttattggtttcagaaccataaagctcgtgagaggcagaagaaaaggttcaccactgatgtccccatgcaacaaagaactgtttcgaatgcttctagttggaagcctgaagactattccttccacaacaaataccccaacattgctcctgggttttcttctgcatctccatcctcagctgctgggcttcctgttggacagatgggaaactatgggtatggatctgtaactatggagaagagttttagggactgctcaatatcagctactgccaacggtggtgttggtggatccatgagccccaactgtgggtgggttggcattgatccctactgttcatcctactctctctttgacaagcaaaaatcaactaatgaaaccctagaagatgaagaacaagatcaagatcaagaagaggaagcaactccagggattgaaaccctccctctcttccctacccagagagaagacatcaatggcttctgcaacatgaagcaccaccccatctgctactccgaaaactactgctatggctctgacgatggaaacaacgcttcgcgtacttccctcgaacttagcctcaactcttacagcaatgggcaggcacgggattccatctaa

SEQ ID NO: 132 - protein, 288 aa, Manihot esculenta
MEPQQQQQQQQNQQQPNDDNSSGAKGNFLCRQSSTRWTPTTDQIRILKDLYYNSGVRSPSAEQIQRISARLRQYGKIEGKNVFYWFQNHKARERQKKRFTTDVPMQQRTVSNASSWKPEDYSFHNKYPNIAPGFSSASPSSAAGLPVGQMGNYGYGSVTMEKSFRDCSISATANGGVGGSMSPNCGWVGIDPYCSSYSLFDKQKSTNETLEDEEQDQDQEEEATPGIETLPLFPTQREDINGFCNMKHHPICYSENYCYGSDDGNNASRTSLELSLNSYSNGQARDSI

SEQ ID NO: 133 - DNA, 960 bp, Kalanchoe fedtschenkoi
atggaagctcaacagcaacagcataatacaatgatgggtgatgaccttggcggtggcaagttggcagccaccagcttcacaagagcgcaaaccaacagcagcaacaaccacagcctagttaataacaacggcggcagaagaagcagcacgaggtggacaccaacaacagaccagataagaatactcaaagatctttactacaacaatggagtgaggtctcccacggtggagcagattcagaggatctctgctaggttgagacagtacggtaagatcgagggcaaaaatgtcttctactggtttcagaaccaaaaggctcgtgaaagacagaagaggaggttcaacacaaccagcaccaccaacaacaacactgctcccgctcctctccctccatcttctactgtttgtaaaccttcttcgctagactcatccactccacacattcacactgcagcagcagctgctgctgctgcctccaaatactcagacatcaacaacaaccaaaaccttatctacccagctgggcacaatcagatgtcaggtttcggatatgctgcctccgtaacaatggagaagagcttcagagattgttctatatcgacgggcgggtcatctttcggttgggctaaaggaggaatgacagatcaccatctgtctcgtcatccctacccgcacacttcaccctatgcaatctacaaccagcggaaatcaataaacagtgatgagtatcacgagctactggcatcatcaacttcggatcatcatgaacatggggataatcggggtccggagattgaaaccctgccactatttcccatgcacggcgaggacatcaactacggcttctgccaccttaattcagccgagactgatggctggttcaatcgcgatgtgggtagtggctctcgtgcgtccctcgagctcagtctcaactcttacgcaggaatggaccacacctag

SEQ ID NO: 134 - protein, 319 aa, Kalanchoe fedtschenkoi
MEAQQQQHNTMMGDDLGGGKLAATSFTRAQTNSSNNHSLVNNNGGRRSSTRWTPTTDQIRILKDLYYNNGVRSPTVEQIQRISARLRQYGKIEGKNVFYWFQNQKARERQKRRFNTTSTTNNNTAPAPLPPSSTVCKPSSLDSSTPHIHTAAAAAAAASKYSDINNNQNLIYPAGHNQMSGFGYAASVTMEKSFRDCSISTGGSSFGWAKGGMTDHHLSRHPYPHTSPYAIYNQRKSINSDEYHELLASSTSDHHEHGDNRGPEIETLPLFPMHGEDINYGFCHLNSAETDGWFNRDVGSGSRASLELSLNSYAGMDHT

SEQ ID NO: 135 - DNA, 840 bp, Gossypium hirsutum
atggaaccccagcaacagcaacagcaaaaccaacaagctccaaatgaggattgtggtggtggcagtggcaaaggaagctttctttgcaggcaaagtagtacacggtggactcctaccactgaccagattagaatattgaaggacctttactacaacaatggagttaggtccccgagtgctgatcagattcaaaggatctctgctagacttagacagtacggaaaaatcgaaggcaagaatgtcttttattggtttcagaaccacaaggctcgtgagaggcagaagaaaaggttcaccaccacgactaatcatcatgtccccatgcaaagccctaccactgctgcaaataacaagtatcccaacataactcctggttattctcctacatctctttcttcaactggtgctcttactgttgggcagataggaaactatggctatgggtctataactatggaaaagagttttagggattgctcaatatcagcatgtggtagtagtacaagtgtaggcgaatccctgagtcacaactttggatgggttgggttcgatcctacttattcttcgtcctacacattctttgagcacaaaaaattcatggaagagagacaaaaagatgaagatgatgcagaagaagaagctgctgctccacaaattgagaccctccctctctttcccatgcacagtgaagacgctaatggtttttgcagtaatattaggcccagactagacagctgctactctgggtggtacaggtctgaagatggctacactggttctcgtgcctcacttgagctcagcctcaacccatatgcaggcagaccgcaagattctatctga

SEQ ID NO: 136 - protein, 279 aa, Gossypium hirsutum
MEPQQQQQQNQQAPNEDCGGGSGKGSFLCRQSSTRWTPTTDQIRILKDLYYNNGVRSPSADQIQRISARLRQYGKIEGKNVFYWFQNHKARERQKKRFTTTTNHHVPMQSPTTAANNKYPNITPGYSPTSLSSTGALTVGQIGNYGYGSITMEKSFRDCSISACGSSTSVGESLSHNFGWVGFDPTYSSSYTFFEHKKFMEERQKDEDDAEEEAAAPQIETLPLFPMHSEDANGFCSNIRPRLDSCYSGWYRSEDGYTGSRASLELSLNPYAGRPQDSI

SEQ ID NO: 137 - DNA, 969 bp, Zostera marina
atggaacatcatcatcagcagcagttccacggtggccagccgcagctgatgagtgaaaatgaagagatgaacaacaatgggagcgggggtgggagtagtaagagcagttttctttgcagacagtcgagcacaaggtggatacccactactgatcagataaggatactgaaggatctatactacaacagtggactgagatccccaaacgccgatcagatccaaagaatatccgccagactgaggcagtacggaaagatcgagggtaagaatgttttctactggtttcaaaatcacaaagcccgagagaggcagaagaagagactcaccgtcgatattgctgcagcggcaactaccaacaaattctccaacaacactaatatgtcttcttcttcttctccctcagggatttctcctgcttctcatgcagtgtatgcaggattagggcagatggggagcaatggcggtggatcagtcgtgatggagagaacttcttacatggagtgttccttgccaggtgggatgccgatgcccgtacctgaacccaatgtgggagtcggagtgggatgggtgagtgttgaaacaggagctactactatgcaacaattctactaccatcaacagagaccaaccacaccctttcctgctcctcatcatcaccaccattactacgacgacggttactattccaataataacaaacttcaagcccatcacctacatatacgcgaggaaaatcaacatccagaagatgacgacgaagaagaagaagaagaagaagaagatgaagagatagaaacacttccattgttcccaatccactcacaggagacacagtcttacttcctggaccaacaacatgcaatccacaatcaagaaagcaataacatggaaacctctttggagctcaccctaaactcctactatgctgcttccagtagcagtactccacatggatcagagcatgattaa

SEQ ID NO: 138 - protein, 322 aa, Zostera marina
MEHHHQQQFHGGQPQLMSENEEMNNNGSGGGSSKSSFLCRQSSTRWIPTTDQIRILKDLYYNSGLRSPNADQIQRISARLRQYGKIEGKNVFYWFQNHKARERQKKRLTVDIAAAATTNKFSNNTNMSSSSSPSGISPASHAVYAGLGQMGSNGGGSVVMERTSYMECSLPGGMPMPVPEPNVGVGVGWVSVETGATTMQQFYYHQQRPTTPFPAPHHHHHYYDDGYYSNNNKLQAHHLHIREENQHPEDDDEEEEEEEEDEEIETLPLFPIHSQETQSYFLDQQHAIHNQESNNMETSLELTLNSYYAASSSSTPHGSEHD

SEQ ID NO: 139 - DNA, 693 bp, Amborella trichopoda
atggatcattctgataactgcccaggtaacaacaacaactctggttctggttctggttctggaaccaagtctggttacatgtgcagacaatctaactctagatggatcccaaccgctgaacaaatcagaatccttagagaactttactactctaacggtgttagatctccaaccgctgaacaaatccaaagaatctctgctagacttagacaatacggtaagatcgaaggtaagaacgttttttactggtttcaaaaccataaggctagagaaagacaaaagaagagacttaccgttgatcttgctgttcaaagagctgctgctacctctggtggtcttccaccaggtgttcttaacgtttctcatatcgctggttctacctgcggttctgttcttatggaatcttctcttatggattgctgctctacctctgctcttgaaaaccataacggtagaaaggaaagagctaacggtgatatgatcgttgaaagagaaagatctgctccaggtaaggaaacccttcaactttttccaatgcatcattctccacaaaacgatgataccatcgctgatgattacttttttaacgatgaagaagaaaagccagtttgcatggcttctcttgaacttacccttaactcttttgatagagtttaccatccagattctgattttagatctcattcttcttaa

SEQ ID NO: 140 - protein, 230 aa, Amborella trichopoda
MDHSDNCPGNNNNSGSGSGSGTKSGYMCRQSNSRWIPTAEQIRILRELYYSNGVRSPTAEQIQRISARLRQYGKIEGKNVFYWFQNHKARERQKKRLTVDLAVQRAAATSGGLPPGVLNVSHIAGSTCGSVLMESSLMDCCSTSALENHNGRKERANGDMIVERERSAPGKETLQLFPMHHSPQNDDTIADDYFFNDEEEKPVCMASLELTLNSFDRVYHPDSDFRSHSS

SEQ ID NO: 141 - DNA, 834 bp, Aquilegia coerulea
atggaacctcaacaagatcccaataaccaacaacaacaacttcaacaacaacaacatgaagaaaacagcagtggaagtagtagcaaaagcagttttctttgcaggcaaactagtacaaggtggacacccacaagtgatcagataagaatcttgaaagacctttactacaacaatggagttaggtctccaagtgcagagcaaatacagagaatctcagcaaggttaaggcagtacggtaagattgaaggcaagaatgttttctattggtttcagaaccacaaagctcgtgagagacaaaagaagagattcacaaatgatacaacaaccatgtccatgcaaagagctactactgcaactggtcatgccaaatacattactacttctcctgggatttcatctccatcttctgctggtgtacttggtgttggacagatgggaagcaacatgggatatggatctgttgttatggagaagagttttagagactgttcaatatctcctgctgctggtggtggtggtggtggtggcagtaatatgggtggatatggatccatgaacaacaattttggttggattggtgcgggtgtcgagccatatccatttttcaacaagacaaagcatattcaaaaatatgaagaagaagatttctcccaaactgagattgaaacactaccactatttcccatgcatggtgaagacagtacaaggtttggttcatctggcaacccaaacccgaattggaactggtttcgaacaggagatgaaatgattggatctagaacatcattggagcttagcttgaattcttactctggcgggtcaattaataactga

SEQ ID NO: 142 - protein, 277 aa, Aquilegia coerulea
MEPQQDPNNQQQQLQQQQHEENSSGSSSKSSFLCRQTSTRWTPTSDQIRILKDLYYNNGVRSPSAEQIQRISARLRQYGKIEGKNVFYWFQNHKARERQKKRFTNDTTTMSMQRATTATGHAKYITTSPGISSPSSAGVLGVGQMGSNMGYGSVVMEKSFRDCSISPAAGGGGGGGSNMGGYGSMNNNFGWIGAGVEPYPFFNKTKHIQKYEEEDFSQTEIETLPLFPMHGEDSTRFGSSGNPNPNWNWFRTGDEMIGSRTSLELSLNSYSGGSINN

SEQ ID NO: 143 - DNA, 969 bp, Amaranthus hypochondriacus
atggagtttcaacaacaacaagatgaagagatgataaaccatgttgggaaaatgagcaacaacacaagtaacaataataataataataataactatttatgtagacaaagtagcacaagatggactccaacaacagaacaaataaagcttttaaaagatctttattatttacaaggaattagatctcctactgctgatcaaattcaaagcatttgtgctaggttacgtcgttatggaaaaattgaaggcaaaaatgttttttattggtttcaaaatcataaggctagggaaagacaaaaaaagaagcttactcctacttctcctaataataataataataataataataataatttcataagaaataataataataataataataatggaaatattaacacttttcatgctaaatatccttgttccttcaataataatcccggggtttcttgttcaagttcaccagcaggtgtgatttctggaggtgggcaattgatggggagttttgggtatggagctgtgactatggagactaaatttagggtaagaggaggtattcctattccaaatggagcaaatcaatggagtaactatttcaacccaaacaatccaacatcttactcaaatttctttattgacaaggtatcatcaaatgttgatcatcattatccatacattaaccatcatgatcatgatcatgatcatgatcatcatgatcatgatcattatggcccacaatcacctcatgagattcagactcttcctctctttcccatgcacaatgatcatcatgatctcgatctcgatctcgatctcgatcacgatcaagggttctacacctataagcctcaatcggacggctgtaattataccggaggatatcgatggtcatctaatgttaatggtggacatacttctcttgagcttagtcttaactcttatggatttggatgctattcacctaattaa

SEQ ID NO: 144 - protein, 322 aa, Amaranthus hypochondriacus
MEFQQQQDEEMINHVGKMSNNTSNNNNNNNNYLCRQSSTRWTPTTEQIKLLKDLYYLQGIRSPTADQIQSICARLRRYGKIEGKNVFYWFQNHKARERQKKKLTPTSPNNNNNNNNNNFIRNNNNNNNNGNINTFHAKYPCSFNNNPGVSCSSSPAGVISGGGQLMGSFGYGAVTMETKFRVRGGIPIPNGANQWSNYFNPNNPTSYSNFFIDKVSSNVDHHYPYINHHDHDHDHDHHDHDHYGPQSPHEIQTLPLFPMHNDHHDLDLDLDLDHDQGFYTYKPQSDGCNYTGGYRWSSNVNGGHTSLELSLNSYGFGCYSPN

SEQ ID NO: 145 - DNA, 924 bp, Cucumis sativus
atggaacatcctgccaaacaacaacaacaagaacaaggaattaatgatcaaggtggtgaaggtggtggtggaagcaatggaaaaggtgggtttttgtgtaggcaaagtagcagtcgatggactccaacaactgaccaaatacgaatattgaaagagctttattataacaatggtgttcgctccccaagcgctgatcaaattcagaggatctctgctaggcttagacagtacggtaaaatcgaaggcaaaaacgttttttattggtttcaaaaccataaggctcgtgaaagacagaagaaaagattcacttcaaattctacttctcctattactacctccaatactactacaactactactgattttaaaatttcttcaactaataataatattaactggaagtctgaagatcattcctcctcttctcataacaaatttcctccaggaataacaattgctttaattgattcttgtttttgcagctccttcttcttcggttatggtcgccgttggccatatgggaaattacggatatgggagtgttcaatatcgtcgggaggaaatagcagtgtcgtcggttaccggagccacaacatgggatcatggatcggtatcgatccgtattcttctccggcagctgccgcggcggggggatcagccaatgtgtttgaaaaaacaaaatatgttgaagaaagcatggaagatcacgaggagcaagagatcgaaactctcccccttttccccattcatggtgaccggaataatctcggtggtttctgcagcatgaagccggaatattcagagagctactacaccaccacttggtacgggcggtctgacgataatggagccgccggttctcgggcttcgctggaactcagcctcaactcttacgccaccatctcacctgatgatggaatgtga

SEQ ID NO: 146 - protein, 307 aa, Cucumis sativus
MEHPAKQQQQEQGINDQGGEGGGGSNGKGGFLCRQSSSRWTPTTDQIRILKELYYNNGVRSPSADQIQRISARLRQYGKIEGKNVFYWFQNHKARERQKKRFTSNSTSPITTSNTTTTTTDFKISSTNNNINWKSEDHSSSSHNKFPPGITIALIDSCFCSSFFFGYGRRWPYGKLRIWECSISSGGNSSVVGYRSHNMGSWIGIDPYSSPAAAAAGGSANVFEKTKYVEESMEDHEEQEIETLPLFPIHGDRNNLGGFCSMKPEYSESYYTTTWYGRSDDNGAAGSRASLELSLNSYATISPDDGM

SEQ ID NO: 147 - DNA, 840 bp, Pinus taeda
atggaatctgctgaaagaatcggttcttacgatgtttacagacaaccatcttctaccagatggaacccaacctctgaacaactttctatccttagagaactttactacaccaacggtatcagatctccaaccgttgatgaaatccatagaatctctatgaagctttctagatacggtaagatcgaaggtaagaacgttttttactggtttcaaaaccataaggctagacatagacaaaagaccagactttctgctatgaacgttggtaagccagctgcttctccagctctttctcaaaccaccagaaagcataagcaatgctacatcaccaccaacatcgttcttacccttaaccaacattgctacaccaagaccaacatggttcttcaaatcatctggtctcttggtcttggtaacaagtctcaaaccaccaagatggtttgggaaatcaagatcaccgcttttccaaccatccataccgaatctttttacgaaaacagaatggctggtgaaaactcttcttgcaaggaagctgcttgctgctctcttgaacaaatgtacgctgttaagcatcatgatgttatgaaggctatggaagaaaaccaacttcaagaaggtaagatcaacagacatgttgaaacccttgaactttttccaacccattgcgaagatagatctccagaaccatctgaaaagaagtcttgctgctggggttcttgcgaaaccaaggaaaaccataacaacaacccaccaggtggttacaagggtaagcaaagagattctgttcttgatctttgcctttctcttggtaacaagtcttgcggtcttcatgataactaa

SEQ ID NO: 148 - protein, 279 aa, Pinus taeda
MESAERIGSYDVYRQPSSTRWNPTSEQLSILRELYYTNGIRSPTVDEIHRISMKLSRYGKIEGKNVFYWFQNHKARHRQKTRLSAMNVGKPAASPALSQTTRKHKQCYITTNIVLTLNQHCYTKTNMVLQIIWSLGLGNKSQTTKMVWEIKITAFPTIHTESFYENRMAGENSSCKEAACCSLEQMYAVKHHDVMKAMEENQLQEGKINRHVETLELFPTHCEDRSPEPSEKKSCCWGSCETKENHNNNPPGGYKGKQRDSVLDLCLSLGNKSCGLHDN

SEQ ID NO: 149 - DNA, 1500 bp, Arabidopsis thaliana
tggcaacttcaatgaattctgaatttaaaacatttttttttatatatatagatgatttggcgattttcgaactggaatggtgaaaaagtggttgagtacactattagtttatttatttaaaaaatagagggaaattcaaatgaaaaaaaaagtttcatctacagaaaaaaaaacacgtcaaaattccaaaaaacttgaacgtcttgaacaacggtataaccgtataagaaagggaacttaaaacttaaacgtctacatgattgaaagggtaaaaatattcatattacaatggtataagaaaatggagaagccagaggagcaactccaaagaagaagatgcagcaagagagtgtacattattataattataagttggtatatatgtagttgctaaaaaaaaaaaagagtgtacaatattttctgaagaagcatcgagctggttaatatttaagacccaccaaaacctaccaacaatgttattctcatctctaagcaaaagtttgatctcatctttttttttaattttttttttgatgggtcctcttctacctctgcatctccacgtgctatacaagtggcctcgctgtatgtattatttaccactctcttattgttactaaaaacttgaatgtcacttgaatgtcacttgaatgcaaactatatatttaggtgaataccagatcaaatagcaataaataaaccaacaatttatgctaattaaaaacttgaaaaaacactttccattacctatgattttttaatccaatcttggggtttgatgcccataaaacgaagtcgaaaagagaaaagcgaccttaattgtaataaatgcagctattgacttctctatcaacttcaagtcttcaagtaactacaaatttaataatctccttagcttatcttagagaagcacaaaacaaaagggtctacgcttagtcttcctagattcttgatttgagtcttgatggccacttgctttttatgtctcaatcctaagagttgatacttacttagtattaatcaggtttcacattatctcagacctagcttgcatttttgatacaaacatgtcatgcaatacacataagcaacacgtaccgagtcattgattgaaaaacatgacctaaatagtaatacggactgagagagagtgatgaatcatttcatatgggagacagctttctcatacgcgtccatgcctttgcatgaaagattaaataattcaactctttcacttatcttattttaatttactttgcagaattccaagttttattgcaatcaccaggggtattaaatgggatagtgtaaatgcacctgcaacacatcaactaaccacacactcctccacctgtttgtatttacttcaaaaacttaattcaaaaatccctttgcttctttccttccctctatttataaaccctagtatccggtttttattctaccacacaataccatttgcaacaaacttctctctgaatctcagtgaattctcataaa

SEQ ID NO: 150 - DNA, 1500 bp, Arabidopsis thaliana
tattaaactaattaaacttagcctttttcattagttttgttactggaaacggttcgtctttagtgcacaaagaccaaggtcaatttaattctttaataaattcaattgagagatcagaagcttgtgaatctggttctctctctctcttctcttactagcttttgagtcgacaaaagagagagaaaagatcattaaactcgaatccaaaacttcaaccaacaaaagggaaaaaaagaaaaaataactacaaagagatctatctttagggtttcaaaactttcttgagtttcagatcgaattgagtaagtatttatattatttaagtgttcttcttactgtatcatttctgaccatacaccaaactagggtttcttaaagatcataactctctctctctcgcttcttcctacactagatctgtccgatagatctgatgctttgagaagtcttgtgactttcaagattgatttttctttttgtttgtttgtttatatgtacacatacttggagatagatatactctcatatatgttactgtgcatatggatggatccatcttaagtgtgaataaaaactacccaaatctcatttttgtttgtttcttatctcatttgttgtttttgtaaggccgtcattataaatctaaaacaatttatccgttttcgtaaagaaaatcgctttccaaaaaaaaaaactttgaagtaaaaatatcattttgggtctatattcaaatctctcctcatatttccatctcattatttgtaaaattaatatattaggtcattatcatattgattatagagtttatatgttatgttataaagtaaaagttatatatgtaaatattacgtttgtaatatatatatttatacatatgtacgtatacataatttgtatgtatatgtgcctcatttttaacaaatattatcgttaatctttagtttcattataattttttagggatgtatacattatataaatattttatgttatttatatctgaaatttctatactataacatcttagatagttttcatacgtaattaagagttttaattaatagttacataattatgattagatgaatttatctataaattgtatgcaaaaatatatacatatccaaccgaaaaaatggagagtaaacaaaaacctaacaattaatggtttagtacttgtgaaaatgataaaattattaatttaatatatagtttcataacagctagaaataactttcccttaatataattattttcttccatttccataatgattttcttcttcttcattctgtatacatatatgagcgtttcatatataatcttttactaattcgattgtgattttgattttgggcagtggaagatatacttggagaagaaaatcaaatcacgaaaatatattgatcagtgccttgaaggaaaccaaagttgacaactccaaaaatccatttcgttattaatatctaactgagtgatcatagtcaatcatccataaca

SEQ ID NO: 151 - DNA, 1500 bp, Arabidopsis thaliana
tccattaattcatgtacacaaatttatttgtttaaagtatcattggatccattacacttcagttttcttagcatctttataaaactctcactttcatgatgttttttttttataatttaatatatcctgtatgttgaattttcagttagtcatctatattttgtcttaaattttgccttctttagcattaattaattgatttcttgcctctaatatctttcattcctctcctaatttgctttctgactttctgatttattgtattcttctttaaataatcttatcaatttctgcatagtcagagatgaaaccttcaagaaaacaataaagaggaaagattaaaggttagtattcccttgcctaccaaaaaaaacagaaaggtttgtattctcttcgtatatccttattttcattatacgtttggttttatatataaacacgtgtatatactttatagtagtagtatacatttacatattaatgtgtgtaataaaaacgtttaaatacgatgatgatgataagaaatagctggaaaaaattaatacatcacccaggccttatgtcacgttggttgtaagttgtataataactatatgttggtccgtcgcacaggtgcacagatataatactatttttttcatttcaatttttttttctttcttaatcgccaaatagtagtttacactttttcctgaagagtttttattttttgaaaatctactaatgattatatttaattaaattttgttttgttctcacgaaaatattgtttttttaataaacaggatagagttgggaatttatttgtacctactttttcccattttatttgctttgaacaaatgagtccaacatttctcttttcgtcttctctttcctatcccatctaaatcaaaactgatcaaaatacctcgaaattttaaattaaatcaccatccatcaaagctattatagtgtagaaattttaaagttttttctttggacaacaattgatttccatctacactacatatgatatgactcttgaatcaatcatagtttttatttcagtctgctgattagtttttttcttttcttttaaaagggtaaaaaatcggtagtttcgaataattttgagtatgtgaaaattcattatttttgggttggttattcaataacaaattaatttgtgattgtgatgtcttttttatgcaaggctcttttttcttgctttcaattagtgggtcctttgtttcctacaatcatctccaattcttctgtttgcttatatcattttgtatgatcttcaagaagaaagataaacgactccgaagaaagatttaagttattgttgttcatacaaaaagaaggttgtaaagttgttgacgtggacaaaagtattgccatatttttccagcctcgaagaaatttcccttcttcttcaaaccctaaattttgacaaaactctctacttttttttgcttctagggtttgctttcagtttccggagtataagaaaag

SEQ ID NO: 152 - DNA, 1905 bp, Arabidopsis thaliana
tttgagccaacagtcggaaaacaaccatcacttagcatttttttatttttaatactactatttttttttttgtaattagtcgagtgtaccaatcccaaatttaatgggtatctttcataaccaaaaagaaaaaagcacaaaaacaaaatactactactatactataatggtgaaacacacattacattagcattaaccgctattccttaaaagatatatgagcagactacaaggaagtacatttaaatcagtgtgctaagttttctcaattatcaatctaataattgtacttacataaatttaccaaatcatctcaccatttagggcatacaatttttgctcaataatggagcttgaaaagactaattatagaatgtctttttggttgacacaagctcgcttcttcatgtcgtttactttaaaaattgtagattctttcacaacttataagattctatagcctatttgattatcctttaggatgatgagtataatatctcaaactataaaataaaaatgttcacatcaataattgaaaaaaaatgcatgtatgaattcacgaaaatatggttacggttgtgtgttgctgctagacaaaagtctttcatatattcagttatatttcttaaaactaatcaaaattgttttatgcaattttggcgagtagagagaaaaagcgcgtgggataaataaagaaaggcgttataaaaaaagagaaaaagtcaaccgagtagttctggtaagagagtctcgtgcattcgtaaggtttccaagagtccacatatctatttcatcatcctcttaacgtttttctcacttacttttttccccactcttaattgattccgttgataaaatttgttcgttatatagaaataatcagaatataattagggttaattttggagtaaagaccattcaatcaatggtttggcttgattcttgtttgaaattctatgtttaaaaagggtaatacttacaaacttgactttattagtattttaaaaaatgacaaaacttaaaatggatttgaaatctagcatatttaactttaatacagttttggtttaagtttcactctcttttctatcaaaaatataattttaaaatttgaaagatgttaaaatagacaaatgtcattagtttgttcagatttagttatgtttttaatatacagacaattatattaaaataataataaaaaagtcagatcagttataaaagaaagtcagttcagttttaagacttaagtttgagtcttttggatttgaatttaatagattcacttttattaaaaattgttgaaacactttttaaaaactaaaacatttgtcaaaaaatgcatttaaccaaaaaaatgaaaatgaaaggtagtaagtaataaaagaagaaaacaaaatctaaaaaagtgtctttaaaatctcaaaattaaaatatacaaaaaagtacaagaaaataaaagaaaagggggaaaaagagagtcaatatcaacatgcaagtgtgaatattagactcttcttctctcatcagttaccccaaaactagggtttacccattttcatcatcttcttcttccccacatcactctctgaaagacaataagagagagagacacacacaccaaaaaaaaaaccccattgatttttaagagagagagagagactgagaacgaagagcaaatgagagagaagttgaatcaaatttccgctttcgttctctttctctctcctccatttcagtaataaacactccttcctctttaatttttctgggtttcttcttcttccctcttttgttgtttctgtgtgattcagttctcgatccatcttttcgtgaaaagtatcaatcttttaattctctagttgtttgtcaaatctggttagtttcttctcttgtatttatttg

SEQ ID NO: 153 - DNA, 11210 bp, Artificial Sequence
  RV021090 T-DNA
aattacaacggtatatatcctgtcagccaacaccaaaacatcaaaaaaatcgggatcaggatcaggatctgcggccgcatcctgcaggagctcaaacgagcaggaagcaacgagagggtggcgcgcgaccgacgtgcgtacgtagcatgagcctgagtggagacgttggacgtgtatgtatatacctctctgcgtgttaactatgtacgtaagcggcaggcagtgcaataagtgtggctctgtagtatgtacgtgcgggtacgatgctgtaagctactgaggcaagtccataaataaataatgacacgtgcgtgttctataatctcttcgcttcttcatttgtccccttgcggagtttggcatccattgatgccgttacgctgagaacagacacagcagacgaaccaaaagtgagttcttgtatgaaactatgacccttcatcgctaggctcaaacagcaccccgtacgaacacagcaaattagtcatctaactattagcccctacatgtttcagacgatacataaatatagcccatccttagcaattagctattggccctgcccatcccaagcaatgatctcgaagtatttttaatatatagtatttttaatatgtagcttttaaaattagaagataattttgagacaaaaatctccaagtatttttttgggtattttttactgcctccgtttttctttatttctcgtcacctagtttaattttgtgctaatcggctataaacgaaacagagagaaaagttactctaaaagcaactccaacagattagatataaatcttatatcctgcctagagctgttaaaaagatagacaactttagtggattagtgtatgcaacaaactctccaaatttaagtatcccaactacccaacgcatatcgttcccttttcattggcgcacgaactttcacctgctatagccgacgtacatgttcgttttttttgggcggcgcttactttcttccccgttcgttctcagcatcgcaactcaatttgttatggcggagaagcccttgtatcccaggtagtaatgcacagatatgcattattattattcataaaacgaacgctcttcaactggaagagcggttactaccggttcactagctagctgctaatcgagctagttaccctatgaggtgacatgaagcgctcacggttactatgacggttagcttcacgactgttggtggcagtagcgtacgacttagctatagttccggacttacctagctaggttaccagagctggtcaccttcttcatcgctaagaagacactcagtagtccggaccgatatcgctatcaactttgtatagaaaagttgggccagaatggcccggaccgggttaccaagcggccgcgaattccagaagaccaaagggcaattgagacttttcaacaaagggtaatatcgggaaacctcctcggattccattgcccagctatctgtcacttcatcaaaaggacagtagaaaaggaaggtggcacctacaaatgccatcattgcgataaaggaaaggctatcgttcaagatgcctctgccgacagtggtcccaaagatggacccccacccacgaggagcatcgtggaaaaagaagacgttccaaccacgtcttcaaagcaagtggattgatgtgatatctccactgacgtaagggatgacgcacaatcccactatccttcgcaagacccttcctctatataaggaagttcatttcatttggagaggacccatggaaactcaacaacaacaagcagatattcaagattttgggaacaaaaacagtaacacctatgcatgcaggcaaagcagtactaggtggacacccacaagtgatcagatcagaatactgaaagagctctactacaacaatggaatcagatcaccaactgctgatcagattcagagaatcgctgctcaactcagacagtacggcaagattgaaggcaagaacgtgttttattggtttcagaaccataaagctcgtgaacgccagaagaaacggttcactcctactgctcctccaccaccgtctcacttctccgatcatattaaccaccatcttcccaacgctgcccccatgcagattccgtctcaccaccaccactaccaccatcaagaaccaccacatgtctatgctcaccctcacaaactctacaccactcatcacattggggttggttcttcttcacaaggagtgatgggtgtagggtgtggctatggatctgttgctatggagaagagtttcaggaagtgttcaatatcaccaccgggagagagtaaggccacaggaggaattggccggaatatcggttcaagatcacggataagtgtcgattcgtgttccttcttcgacacaattaagccaaagacatatgagatgtttgagaatcatgatcaagatgaagaacaaggagagccttcaactgagatcgaaacacttccattattcccgattcacgacggcaaccatcatgatttcttcggcatgaggacggcaaatctgcaattggagcaaggcactggaggttactacactggaggaagctggtatcggtctgatgagagggcgtctcttgagctcagtctcaactcatatggttattataactaattcgaactggccaggtacctgacatcttatagtctgcaacctctcgtgtctgaattcctatctttatcaagtgttattgcttccacgactataggacagctttcgtcgaaaggttttgctcatgtgatctcgaaggattcatctagtctgatttttcgtgacttgtatcggttttattggattcatccaacatatatcaataaaaaatgagttgtgtttcctttcttcctagttcagttaaaattatttccctcctgcgcttgtgctgtaattgtctgtgtacctgttgtttgtgactgtgttagttcccttggatatgatttcgtatttgatatgtacatggagatagcttagcttcattattggagtatgaagttagtatgacatagtcactctcctggaaaattgacactgcaaaccatatttttattctgaaccacaaatcctagtcagtccgctggcatatgccgtccgtttgctgaatccagaacgtgggtttggagatgtacggctgagatgcctctatgcgaaggggatttcgtggtgaaacgagatgggagtagagcaacgcccgtggaagatgcttcaaacttccacacttttgagcaacgatcggcagtagtaaggtagacgatttcaagatcaaagcatatgaagataaacaacatcaacaacaaaatttgttggggttctatagagagaaacagagctacatacatacactgttttgtatctaccatctgagatgatgaaaagatgaaaaactaaagaatgccccggcgccaacgccaggacacgccgcgcgcgcgtcacccgagccatctcttgacccagccggcgctgtatatttacacacgttgcagcatcgatcaccacctgttcgatcgcgtcgccgtcaccaagcttggcgcgccggtcacccggtccgggcctagaaggccacccggggctcggcgttaggcttttagtccgctaggtggctagaccgaggttaggacgctagttcactaggggcctagtggtgttttaaggatgggcaagtttgtacaaaaaagcaggctggcgccggaaccaattcagtcgagtgcggccgccagtgtgatggatatctcgacccgggtgattgcggttacatcatgtacggaaaaataattctaatccttgatttaaatttgaacttgactatttatttattctttatttcattttgtaaatcattttatgtatctcctggcaagcaattttatccaccttgcaccaacaccttcgggttccataatcaaaccaccttaacttcacaccatgctgtaactcacaccgcccagcatctccaatgtgaaagaagctaaaatttaataaacaatcatacgaagcagtgacaaaataccagatggtattaatgcttcgataaaattaattggaaagtataaaatggtagaaaataataaattataattaatttaagtaagataaaaaataattaaaaactaaaatgttaaaattttaaaaaaattattttaaataatatttaaaaacattaaaaatcattttaaaaaatttatttatagaacaattaaataaatatttcagctaataaaaaacaaaagcttacctagccttagaagacaacttgtccaacaattagatgatacccattgcccttacgttttctttaacatcaattattgtttttgtcaacaagctatcttttagttttattttattggtaaaaaatatgtcgccttcaagttgcatcatttaacacatctcgtcattagaaaaataaaactcttccctaaacgattagtagaaaaaatcattcgataataaataagaaagaaaaattagaaaaaaataacttcattttaaaaaaatcattaaggctatattttttaaatgactaattttatatagactgtaactaaaagtatacaatttattatgctatgtatcttaaagaattacttataaaaatctacggaagaatatcttacaaagtgaaaaacaaatgagaaagaatttagtgggatgattatgattttatttgaaaattgaaaaaataattattaaagactttagtggagtaagaaagctttcctattagtcttttcttatccataaaaaaaaaaaaaaaaatctagcgtgacagcttttccatagattttaataatgtaaaatactggtagcagccgaccgttcaggtaatggacactgtggtcctaacttgcaacgggtgcgggcccaatttaataacgccgtggtaacggataaagccaagcgtgaagcggtgaaggtacatctctgactccgtcaagattacgaaaccgtcaactacgaaggactccccgaaatatcatctgtgtcataaacaccaagtcacaccatacatgggcacgcgtcacaatatgattggagaacggttccaccgcatatgctataaaatgcccccacacccctcgaccctaatcgcacttcaattgcaatcaaattagttcattctctttgcgcagttccctacctctcctttcaaggttcgtagatttcttccgtttttttttcttcttctttattgtttgttctacatcagcatgatgttgatttgattgtgttttctatcgtttcatcgattataaattttcataatcagaagattcagcttttattaatgcaagaacgtccttaattgatgattttataaccgtaaattaggtctaattagagtttttttcataaagattttcagatccgtttacaacaagccttaattgttgattctgtagtcgtagattaaggtttttttcatgaactacttcagatccgttaaacaacagccttatttgttgatacttcagtcgtttttcaagaaattgttcagatccgttgataaaagccttattcgttgattctgtatggtatttcaagagatattgctcaggtcctttagcaactaccttatttgttgattctgtggccatagattaggattttttttcacgaaattgcttcttgaaattacgtgatggattttgattctgatttatcttgtgattgttgactctacagccatggcccacagcaagcacggcctgaaggaggagatgaccatgaagtaccacatggagggctgcgtgaacggccacaagttcgtgatcaccggcgagggcatcggctaccccttcaagggcaagcagaccatcaacctgtgcgtgatcgagggcggccccctgcccttcagcgaggacatcctgagcgccggcttcaagtacggcgaccggatcttcaccgagtacccccaggacatcgtggactacttcaagaacagctgccccgccggctacacctggggccggagcttcctgttcgaggacggcgccgtgtgcatctgtaacgtggacatcaccgtgagcgtgaaggagaactgcatctaccacaagagcatcttcaacggcgtgaacttccccgccgacggccccgtgatgaagaagatgaccaccaactgggaggccagctgcgagaagatcatgcccgtgcctaagcagggcatcctgaagggcgacgtgagcatgtacctgctgctgaaggacggcggccggtaccggtgccagttcgacaccgtgtacaaggccaagagcgtgcccagcaagatgcccgagtggcacttcatccagcacaagctgctgcgggaggaccggagcgacgccaagaaccagaagtggcagctgaccgagcacgccatcgccttccccagcgccctggcctgagagctcgaatttccccgatcgttcaaacatttggcaataaagtttcttaagattgaatcctgttgccggtcttgcgatgattatcatataatttctgttgaattacgttaagcatgtaataattaacatgtaatgcatgacgttatttatgagatgggtttttatgattagagtcccgcaattatacatttaatacgcgatagaaaacaaaatatagcgcgcaaactaggataaattatcgcgcgcggtgtcatctatgttactagatcgggaattctagtggccggcccagctgatatctagacccagctttcttgtacaaagtggccgttaacggatctggccgcggccgcatcaggatattcttgtttaagatgttgaactctatggaggtttgtatgaactgatgatctaggaccggataagttcccttcttcatagcgaacttattcaaagaatgttttgtgtatcattcttgttacattgttattaatgaaaaaatattattggtcattggactgaacacgagtgttaaatatggaccaggccccaaataagatccattgatatatgaattaaataacaagaataaatcgagtcaccaaaccacttgccttttttaacgagacttgttcaccaacttgatacaaaagtcattatcctatgcaaatcaataatcatacaaaaatatccaataacactaaaaaattaaaagaaatggataatttcacaatatgttatacgataaagaagttacttttccaagaaattcactgattttataagcccacttgcattagataaatggcaaaaaaaaacaaaaaggaaaagaaataaagcacgaagaattctagaaaatacgaaatacgcttcaatgcagtgggacccacggttcaattattgccaattttcagctccaccgtatatttaaaaaataaaacgataatgctaaaaaaatataaatcgtaacgatcgttaaatctcaacggctggatcttatgacgaccgttagaaattgtggttgtcgacgagtcagtaataaacggcgtcaaagtggttgcagccggcacacacgagtcgtgtttatcaactcaaagcacaaatacttttcctcaacctaaaaataaggcaattagccaaaaacaactttgcgtgtaaacaacgctcaatacacgtgtcattttattattagctattgcttcaccgccttagctttctcgtgacctagtcgtcctcgtcttttcttcttcttcttctataaaacaatacccaaagagctcttcttcttcacaattcagatttcaatttctcaaaatcttaaaaactttctctcaattctctctaccgtgatcaaggtaaatttctgtgttccttattctctcaaaatcttcgattttgttttcgttcgatcccaatttcgtatatgttctttggtttagattctgttaatcttagatcgaagacgattttctgggtttgatcgttagatatcatcttaattctcgattagggtttcatagatatcatccgatttgttcaaataatttgagttttgtcgaataattactcttcgatttgtgatttctatctagatctggtgttagtttctagtttgtgcgatcgaatttgtcgattaatctgagtttttctgattaacagccatggctgcaactactcttacatctgctttacctggtgctttcagttcatcccagagaccaagtgctcctttcaacttacaaagatcacctagagtgcttagaaggttcaacagaaagacaggacgtcaacctcgtggacttgttcgtgctgcaaaggctcaagcggcgcaaaacctgccagagaaattcgatgaaacaagactctgggaggccctcaggggatttggggttagtccaagtagggttacttacgctcccgtcggattcggagattaccactggaccgtcacagatgaagacgggagaccttggttcgcaactgtcagtgacctcgaacacaaagagcattgcgggcagggagcacaagcagcccttaaaggactcagacaagctatggacactgccctcgcacttagagatagggacggactcagattcgtggttgctccagtggcagcaacagatgggggtggccctgtccttccccttgacgctaggtatgcactcacagtcttccctcacgtcccaggaagaacaggagagttcggacaaagactcacagaggcagagagggacagactgcttgctcttctggcagaactccacggaagaacacctcctgaaacaaccccaccagccgatatggaaccaccaggacttcctggtgttagagcagcactcgccgaaagtgaaggaccttggagtggaggaccatttgcagaacccgctagacttcttctcagagaacacgaggccacactgcacgcaagactcgctgaattcgaagccctcgtcgcaagagttaagggtcgtggagcacctcttgtcgttacccacggagaaccacacccaggcaacttgatcctcggagaggaaggctatctcctcgtggactgggatacagttggactggctccagctgaaagggatttgagtctcatctcagacgacccagctgacctcgcaagatacgcagagcttacaggaagaactccagacccagacgcactcgcactctatagactgcgttggagtctccttgatgtggctgagttcgtcgagtggttcagggctgaacaccaaagaacccaagacaccgagagtgcatggaaggggttcactgacacacttgggcaattggctgctggtggatcagctgcatagcctaggaaacttatctctgttatgaatcagaagaagttcatgtctcgtttcatttaaaactttggtggtttgtgttttggggccttgtaaagcccctgatgaataattgttcaactatgtttccgttcctgtgttatacctttctttctaatgagtaatgacatcaaacttcttctgtattgaaattatgtccttgtgagtctctttatcatcgtttcgtctttacattatatgtgctacttttgtctaatgagcctgaaaagtggctccaatggtacgcactggaagatttgttggcttctggtagatatagcgacagtgttgagcttgtaatatcatgtctcttattgctaaattagttcctttcttaacagaaaccttcaaagtttttgtttttgttttcatttacctaatgtacacatacgctggccatgactaacaacatgtccaggcttagagcatatttttttctagcttaaattgttaacttgtcattcagtaaaatccgagaattgtgaagctctaattgaagctaattcgttttataaagtcagttaaaaagtatactaaattatccaacttttcttcaaaatctcaaaattctatgacaaaacgatagtctttgtttatgtcagtaccacaaagaggtggaaaaaaacaccaaaaaaacaataagcaaactatacactgagaagaaaaataaaagagagctcaatagatgttttatactaacggtagattagatcaaagatccaagctttactctacatagagcagaacccagaatcccttcatatctcttttattctagcaccgataatctactgaaaagaagacacttagagctctgtctctttgtcaaagaagtcccagccgtcatccagaagctccttacgttcattaacagaggtaccggcggccgcgggcaactttattatacaaagttgatagatatcggtccgacggccagaatggccatctggattcagcaggcctagaaggccatttagtcctagcgatcgcgctgacaagcggtatttaaatcatcattctaggcgcgccacttacgcttgattccgatgacttcgtaggttcctagctcaagccgctcgtgtccaagcgtcacttacgattagctaatgattacggcatctaggaccgactagttcttatgtgcttctagtctccaaatgtggttgatagttattttgctctaagatcaacagtaatgaagtataaatcatcgttgtggtgtgctactcggttaattgagcattaacacacacaaacatgacgaggatggtataatctccaaaaatgtgtactttgttaggtgggaccctatagccttgattaatgtgctatgttaggcatgcctggaaacgtgtgacgcatatgttttgtgaacctgttgatattatatgtgcttttatattaccatattttattaaaatactaatatttattactagtaagatataacattctatctagcttaaaaactaaccataaatattccataataactagatttaccaaactaatatactaaatatacataataaatacaaaattaacaagacaataatcaatatttatgagcttaatatatttagacattatggttggtcgacgataatcatgctaacttttcgtaattgcttgattgaaatatgcttagaataatgcctctttgttctacatggcaaatagggaccattatggtgtaacaccctgggaaccacaaacaccccgaaatgctactaaactacacaactaaccttcatatataaaatttcgacagcatctcctttgaaaatttgcatagacgtggaagcaacagagtataaacagatctagctagctaagtttaaacggccggccaaacgtgcaagcgctactagacaattcagtacattaaaaacgtccgcaatgtgttattaagttgtctaagcgtcaatttatttacaattgaatatatcctgcca

SEQ ID NO: 154 - DNA, 15172 bp, Artificial Sequence
  RV026522 T-DNA
caaacaaacatacacagcgatttattcacacgaacccgaattacaacggtatatatcctgtcagccaacaccaaaacatcaaaaaaatcgggatcaggatcaggatctgcggccgcatcctgcaggtttaaacggccggccttcactagctagctgctaagctcaaacgagcaggaagcaacgagagggtggcgcgcgaccgacgtgcgtacgtagcatgagcctgagtggagacgttggacgtgtatgtatatacctctctgcgtgttaactatgtacgtaagcggcaggcagtgcaataagtgtggctctgtagtatgtacgtgcgggtacgatgctgtaagctactgaggcaagtccataaataaataatgacacgtgcgtgttctataatctcttcgcttcttcatttgtccccttgcggagtttggcatccattgatgccgttacgctgagaacagacacagcagacgaaccaaaagtgagttcttgtatgaaactatgacccttcatcgctaggctcaaacagcaccccgtacgaacacagcaaattagtcatctaactattagcccctacatgtttcagacgatacataaatatagcccatccttagcaattagctattggccctgcccatcccaagcaatgatctcgaagtatttttaatatatagtatttttaatatgtagcttttaaaattagaagataattttgagacaaaaatctccaagtatttttttgggtattttttactgcctccgtttttctttatttctcgtcacctagtttaattttgtgctaatcggctataaacgaaacagagagaaaagttactctaaaagcaactccaacagattagatataaatcttatatcctgcctagagctgttaaaaagatagacaactttagtggattagtgtatgcaacaaactctccaaatttaagtatcccaactacccaacgcatatcgttcccttttcattggcgcacgaactttcacctgctatagccgacgtacatgttcgttttttttgggcggcgcttactttcttccccgttcgttctcagcatcgcaactcaatttgttatggcggagaagcccttgtatcccaggtagtaatgcacagatatgcattattattattcataaaatcgagctagttaccctatgaggtgacatgaagcgctcacggttactatgacggttagcttcacgactgttggtggcagtagcgtacgacttagctatagttccggacttacctaactgactagagtcacacttagctgaccctagtcacttaggcgcgccaagcttggatctcctgcaggatctggccggccggatgggcggatctcgtacctcaactttgtatagaaaagttgggccagaatggcccggaccgggttaccaagcggccgcgaattccagaagaccaaagggcaattgagacttttcaacaaagggtaatatcgggaaacctcctcggattccattgcccagctatctgtcacttcatcaaaaggacagtagaaaaggaaggtggcacctacaaatgccatcattgcgataaaggaaaggctatcgttcaagatgcctctgccgacagtggtcccaaagatggacccccacccacgaggagcatcgtggaaaaagaagacgttccaaccacgtcttcaaagcaagtggattgatgtgatatctccactgacgtaagggatgacgcacaatcccactatccttcgcaagacccttcctctatataaggaagttcatttcatttggagaggacccatggaagaaaacagcaacagcagcagaagcagcaacagcggcgcacgttggaatccgacgccggagcagctgagcattctgaaagagctgtatcatggccgcggaatcaggtcgcccagcgccgaacagatccaccatatctcatggaaactcagctcctacggcaaaatcgagggcaagaacgtcttctactggttccagaaccataaggcccgccagcgtcaaaaagagcgtctcggttccgtcatgcctgcttctgcttcttcttcttcttttgcatctccttctcagggagctgtcggcattcgaaggggaagtacggtgctatgtcttaaggaaacttcagcttcatcttcatcttattcttctgttccgcgttcggtatcagctgtgcgccagtgtgctgcatctcgtgactgtggcttgcaccatgatctgacaactctggagctgtttcccctgcaccgtgaaagtagaatagacgctggggaggaagacgaggagcaacaggaggtggtggtgctagataataataataacacctggacaaggcaccaaaatgtaaatgtgaatcatgcaaataatgacgatgagccacagcatggtcatgggcagattgatattgatgtagggcttcgtctttgcctcggtggatttcgctgaggtacctgacatcttatagtctgcaacctctcgtgtctgaattcctatctttatcaagtgttattgcttccacgactataggacagctttcgtcgaaaggttttgctcatgtgatctcgaaggattcatctagtctgatttttcgtgacttgtatcggttttattggattcatccaacatatatcaataaaaaatgagttgtgtttcctttcttcctagttcagttaaaattatttccctcctgcgcttgtgctgtaattgtctgtgtacctgttgtttgtgactgtgttagttcccttggatatgatttcgtatttgatatgtacatggagatagcttagcttcattattggagtatgaagttagtatgacatagtcactctcctggaaaattgacactgcaaaccatatttttattctgaaccacaaatcctagtcagtccgctggcatatgccgtccgtttgctgaatccagaacgtgggtttggagatgtacggctgagatgcctctatgcgaaggggatttcgtggtgaaacgagatgggagtagagcaacgcccgtggaagatgcttcaaacttccacacttttgagcaacgatcggcagtagtaaggtagacgatttcaagatcaaagcatatgaagataaacaacatcaacaacaaaatttgttggggttctatagagagaaacagagctacatacatacactgttttgtatctaccatctgagatgatgaaaagatgaaaaactaaagaatgccccggcgccaacgccaggacacgccgcgcgcgcgtcacccgagccatctcttgacccagccggcgctgtatatttacacacgttgcagcatcgatcaccacctgttcgatcgcgtcgccgtcaccaagcttggcgcgccggtcacccggtccgggcctagaaggccacccggggctcggcgttaggcttttagtccgctaggtggctagaccgaggttaggacgctagttcactaggggcctagtggtgttttaaggatgggcaagtttgtacaaaaaagcaggctggcgccggaaccaattcagtcgagtgcggccgccagtgtgatggatatctcgacccgggtgattgcggttacatcatgtacggaaaaataattctaatccttgatttaaatttgaacttgactatttatttattctttatttcattttgtaaatcattttatgtatctcctggcaagcaattttatccaccttgcaccaacaccttcgggttccataatcaaaccaccttaacttcacaccatgctgtaactcacaccgcccagcatctccaatgtgaaagaagctaaaatttaataaacaatcatacgaagcagtgacaaaataccagatggtattaatgcttcgataaaattaattggaaagtataaaatggtagaaaataataaattataattaatttaagtaagataaaaaataattaaaaactaaaatgttaaaattttaaaaaaattattttaaataatatttaaaaacattaaaaatcattttaaaaaatttatttatagaacaattaaataaatatttcagctaataaaaaacaaaagcttacctagccttagaagacaacttgtccaacaattagatgatacccattgcccttacgttttctttaacatcaattattgtttttgtcaacaagctatcttttagttttattttattggtaaaaaatatgtcgccttcaagttgcatcatttaacacatctcgtcattagaaaaataaaactcttccctaaacgattagtagaaaaaatcattcgataataaataagaaagaaaaattagaaaaaaataacttcattttaaaaaaatcattaaggctatattttttaaatgactaattttatatagactgtaactaaaagtatacaatttattatgctatgtatcttaaagaattacttataaaaatctacggaagaatatcttacaaagtgaaaaacaaatgagaaagaatttagtgggatgattatgattttatttgaaaattgaaaaaataattattaaagactttagtggagtaagaaagctttcctattagtcttttcttatccataaaaaaaaaaaaaaaaatctagcgtgacagcttttccatagattttaataatgtaaaatactggtagcagccgaccgttcaggtaatggacactgtggtcctaacttgcaacgggtgcgggcccaatttaataacgccgtggtaacggataaagccaagcgtgaagcggtgaaggtacatctctgactccgtcaagattacgaaaccgtcaactacgaaggactccccgaaatatcatctgtgtcataaacaccaagtcacaccatacatgggcacgcgtcacaatatgattggagaacggttccaccgcatatgctataaaatgcccccacacccctcgaccctaatcgcacttcaattgcaatcaaattagttcattctctttgcgcagttccctacctctcctttcaaggttcgtagatttcttccgtttttttttcttcttctttattgtttgttctacatcagcatgatgttgatttgattgtgttttctatcgtttcatcgattataaattttcataatcagaagattcagcttttattaatgcaagaacgtccttaattgatgattttataaccgtaaattaggtctaattagagtttttttcataaagattttcagatccgtttacaacaagccttaattgttgattctgtagtcgtagattaaggtttttttcatgaactacttcagatccgttaaacaacagccttatttgttgatacttcagtcgtttttcaagaaattgttcagatccgttgataaaagccttattcgttgattctgtatggtatttcaagagatattgctcaggtcctttagcaactaccttatttgttgattctgtggccatagattaggattttttttcacgaaattgcttcttgaaattacgtgatggattttgattctgatttatcttgtgattgttgactctacagccatggcccacagcaagcacggcctgaaggaggagatgaccatgaagtaccacatggagggctgcgtgaacggccacaagttcgtgatcaccggcgagggcatcggctaccccttcaagggcaagcagaccatcaacctgtgcgtgatcgagggcggccccctgcccttcagcgaggacatcctgagcgccggcttcaagtacggcgaccggatcttcaccgagtacccccaggacatcgtggactacttcaagaacagctgccccgccggctacacctggggccggagcttcctgttcgaggacggcgccgtgtgcatctgtaacgtggacatcaccgtgagcgtgaaggagaactgcatctaccacaagagcatcttcaacggcgtgaacttccccgccgacggccccgtgatgaagaagatgaccaccaactgggaggccagctgcgagaagatcatgcccgtgcctaagcagggcatcctgaagggcgacgtgagcatgtacctgctgctgaaggacggcggccggtaccggtgccagttcgacaccgtgtacaaggccaagagcgtgcccagcaagatgcccgagtggcacttcatccagcacaagctgctgcgggaggaccggagcgacgccaagaaccagaagtggcagctgaccgagcacgccatcgccttccccagcgccctggcctgagagctcgaatttccccgatcgttcaaacatttggcaataaagtttcttaagattgaatcctgttgccggtcttgcgatgattatcatataatttctgttgaattacgttaagcatgtaataattaacatgtaatgcatgacgttatttatgagatgggtttttatgattagagtcccgcaattatacatttaatacgcgatagaaaacaaaatatagcgcgcaaactaggataaattatcgcgcgcggtgtcatctatgttactagatcgggaattctagtggccggcccagctgatatctagacccagctttcttgtacaaagtggccgttaacggatcggccagaatggcccggaccgggttaccgaattcgagctcggtaccctgggatccgatatcgatgggccctggccgaagcttggtcacccggtccgggcctagaaggccagcttcggccgccccgggcaactttattatacaaagttgatggtacggatccgtcgacggcgcgccgcggacctgaattccagcacactggcggccgttagtctaaaaacggcccctaactaacgcttagttgcccgctagattagtcccccgttagtgcctagttagacacacgacgaactaggggctactagtaacggccgccagtgtgctcggtacggccagaatggccatctggattcagcagggggtgattgcggttacatcatgtacggaaaaataattctaatccttgatttaaatttgaacttgactatttatttattctttatttcattttgtaaatcattttatgtatctcctggcaagcaattttatccaccttgcaccaacaccttcgggttccataatcaaaccaccttaacttcacaccatgctgtaactcacaccgcccagcatctccaatgtgaaagaagctaaaatttaataaacaatcatacgaagcagtgacaaaataccagatggtattaatgcttcgataaaattaattggaaagtataaaatggtagaaaataataaattataattaatttaagtaagataaaaaataattaaaaactaaaatgttaaaattttaaaaaaattattttaaataatatttaaaaacattaaaaatcattttaaaaaatttatttatagaacaattaaataaatatttcagctaataaaaaacaaaagcttacctagccttagaagacaacttgtccaacaattagatgatacccattgcccttacgttttctttaacatcaattattgtttttgtcaacaagctatcttttagttttattttattggtaaaaaatatgtcgccttcaagttgcatcatttaacacatctcgtcattagaaaaataaaactcttccctaaacgattagtagaaaaaatcattcgataataaataagaaagaaaaattagaaaaaaataacttcattttaaaaaaatcattaaggctatattttttaaatgactaattttatatagactgtaactaaaagtatacaatttattatgctatgtatcttaaagaattacttataaaaatctacggaagaatatcttacaaagtgaaaaacaaatgagaaagaatttagtgggatgattatgattttatttgaaaattgaaaaaataattattaaagactttagtggagtaagaaagctttcctattagtcttttcttatccataaaaaaaaaaaaaaaaatctagcgtgacagcttttccatagattttaataatgtaaaatactggtagcagccgaccgttcaggtaatggacactgtggtcctaacttgcaacgggtgcgggcccaatttaataacgccgtggtaacggataaagccaagcgtgaagcggtgaaggtacatctctgactccgtcaagattacgaaaccgtcaactacgaaggactccccgaaatatcatctgtgtcataaacaccaagtcacaccatacatgggcacgcgtcacaatatgattggagaacggttccaccgcatatgctataaaatgcccccacacccctcgaccctaatcgcacttcaattgcaatcaaattagttcattctctttgcgcagttccctacctctcctttcaaggttcgtagatttcttccgtttttttttcttcttctttattgtttgttctacatcagcatgatgttgatttgattgtgttttctatcgtttcatcgattataaattttcataatcagaagattcagcttttattaatgcaagaacgtccttaattgatgattttataaccgtaaattaggtctaattagagtttttttcataaagattttcagatccgtttacaacaagccttaattgttgattctgtagtcgtagattaaggtttttttcatgaactacttcagatccgttaaacaacagccttatttgttgatacttcagtcgtttttcaagaaattgttcagatccgttgataaaagccttattcgttgattctgtatggtatttcaagagatattgctcaggtcctttagcaactaccttatttgttgattctgtggccatagattaggattttttttcacgaaattgcttcttgaaattacgtgatggattttgattctgatttatcttgtgattgttgactctacagccatggctgcaactactcttacatctgctttacctggtgctttcagttcatcccagagaccaagtgctcctttcaacttacaaagatcacctagagtgcttagaaggttcaacagaaagacaggacgtcaacctcgtggacttgttcgtgctgcaaaggctcaagcggcgcaaaacctgccagagaaattcgatgaaacaagactctgggaggccctcaggggatttggggttagtccaagtagggttacttacgctcccgtcggattcggagattaccactggaccgtcacagatgaagacgggagaccttggttcgcaactgtcagtgacctcgaacacaaagagcattgcgggcagggagcacaagcagcccttaaaggactcagacaagctatggacactgccctcgcacttagagatagggacggactcagattcgtggttgctccagtggcagcaacagatgggggtggccctgtccttccccttgacgctaggtatgcactcacagtcttccctcacgtcccaggaagaacaggagagttcggacaaagactcacagaggcagagagggacagactgcttgctcttctggcagaactccacggaagaacacctcctgaaacaaccccaccagccgatatggaaccaccaggacttcctggtgttagagcagcactcgccgaaagtgaaggaccttggagtggaggaccatttgcagaacccgctagacttcttctcagagaacacgaggccacactgcacgcaagactcgctgaattcgaagccctcgtcgcaagagttaagggtcgtggagcacctcttgtcgttacccacggagaaccacacccaggcaacttgatcctcggagaggaaggctatctcctcgtggactgggatacagttggactggctccagctgaaagggatttgagtctcatctcagacgacccagctgacctcgcaagatacgcagagcttacaggaagaactccagacccagacgcactcgcactctatagactgcgttggagtctccttgatgtggctgagttcgtcgagtggttcagggctgaacaccaaagaacccaagacaccgagagtgcatggaaggggttcactgacacacttgggcaattggctgctggtggatcagctgcatagcaaacttatctctgttatgaatcagaagaagttcatgtctcgtttcatttaaaactttggtggtttgtgttttggggccttgtaaagcccctgatgaataattgttcaactatgtttccgttcctgtgttatacctttctttctaatgagtaatgacatcaaacttcttctgtattgaaattatgtccttgtgagtctctttatcatcgtttcgtctttacattatatgtgctacttttgtctaatgagcctgaaaagtggctccaatggtacgcactggaagatttgttggcttctggtagatatagcgacagtgttgagcttgtaatatcatgtctcttattgctaaattagttcctttcttaacagaaaccttcaaagtttttgtttttgttttcatttacctaatgtacacatacgctggccatgactaacaacatgtccaggcttagagcatatttttttctagcttaaattgttaacttgtcattcagtaaaatccgagaattgtgaagctctaattgaagctaattcgttttataaagtcagttaaaaagtatactaaattatccaacttttcttcaaaatctcaaaattctatgacaaaacgatagtctttgtttatgtcagtaccacaaagaggtggaaaaaaacaccaaaaaaacaataagcaaactatacactgagaagaaaaataaaagagagctcaatagatgttttatactaacggtagattagatcaaagatccaagctttactctacatagagcagaacccagaatcccttcatatctcttttattctagcaccgataatctactgaaaagaagacacttagagctctgtctctttgtcaaagaagtcccagccgtcatccagaagctccttacgttcattaacagaggccgcaattggatcgggtttacttattttgtgggtatctatacttttattagatttttaatcaggctcctgatttctttttatttcgattgaattcctgaacttgtattattcagtagatcgaataaattataaaaagataaaatcataaaataatattttatcctatcaatcatattaaagcaatgaatatgtaaaattaatcttatctttattttaaaaaatcatataggtttagtatttttttaaaaataaagataggattagttttactattcactgcttattacttttaaaaaaatcataaaggtttagtatttttttaaaataaatataggaatagttttactattcactgctttaatagaaaaatagtttaaaatttaagatagttttaatcccagcatttgccacgtttgaacgtgagccgaaacgatgtcgttacattatcttaacctagctgaaacgatgtcgtcataatatcgccaaatgccaactggactacgtcgaacccacaaatcccacaaagcgcgtgaaatcaaatcgctcaaaccacaaaaaagaacaacgcgtttgttacacgctcaatcccacgcgagtagagcacagtaaccttcaaataagcgaatggggcataatcagaaatccgaaataaacctaggggcattatcggaaatgaaaagtagctcactcaatataaaaatctaggaaccctagttttcgttatcactctgtgctccctcgctctatttctcagtctctgtgtttgcggctgaggattccgaacgagtgaccttcttcgtttctcgcaaaggtaacagcctctgctcttgtctcttcgattcgatctatgcctgtctcttatttacgatgatgtttcttcggttatgtttttttatttatgctttatgctgttgatgttcggttgtttgtttcgctttgtttttgtggttcagttttttaggattcttttggtttttgaatcgattaatcggaagagattttcgagttatttggtgtgttggaggtgaatcttttttttgaggtcatagatctgttgtatttgtgttataaacatgcgactttgtatgattttttacgaggttatgatgttctggttgttttattatgaatctgttgagacagaaccatgatttttgttgatgttcgtttacactattaaaggtttgttttaacaggattaaaagttttttaagcatgttgaaggagtcttgtagatatgtaaccgtcgatagtttttttgtgggtttgttcacatgttatcaagcttaatcttttactatgtatgcgaccatatctggatccagcaaaggcgattttttaattccttgtgaaacttttgtaatatgaagttgaaattttgttattggtaaactataaatgtgtgaagttggagtatacctttaccttcttatttggctttgtgatagtttaatttatatgtattttgagttctgacttgtatttctttgaattgattctagtttaagtaatcatggcctcctccgagaacgtcatcaccgagttcatgcgcttcaaggtgcgcatggagggcaccgtgaacggccacgagttcgagatcgagggcgagggcgagggccgcccctacgagggccacaacaccgtgaagctgaaggtgacgaagggcggccccctgcccttcgcctgggacatcctgtccccccagttccagtacggctccaaggtgtacgtgaagcaccccgccgacatccccgactacaagaagctgtccttccccgagggcttcaagtgggagcgcgtgatgaacttcgaggacggcggcgtggcgaccgtgacccaggactcctccctgcaggacggctgcttcatctacaaggtgaagttcatcggcgtgaacttcccctccgacggccccgtgatgcagaagaagaccatgggctgggaggcctccaccgagcgcctgtacccccgcgacggcgtgctgaagggcgagacccacaaggccctgaagctgaaggacggcggccactacctggtggagttcaagtccatctacatggccaagaagcccgtgcagctgcccggctactactacgtggacgccaagctggacatcacctcccacaacgaggactacaccatcgtggagcagtacgagcgcaccgagggccgccaccacctgttcctgtagttttgtgatctgatgataagtggttggttcgtgtctcatgcacttgggaggtgatctatttcacctggtgtagtttgtgtttccgtcagttggaaaaacttatccctatcgatttcgttttcattttctgcttttcttttatgtaccttcgtttgggcttgtaacgggcctttgtatttcaactctcaataataatccaagtgcatgttaaacaatttgtcatctgtttcggctttgatatactactggtgaagatgggccgtactactgcatcacaacgaaaaataataataagatgaaaaacttgaagtggaaaaaaaaaaaaacttgaatgttcactactactcattgaccataatgtttaacatacatagctcaatagtatttttgtgaatatggcaacacaaacagtccaaaacaattgtctcttactataccaaaccaagggcgccgcttgtttgccactctttgtgtgcaatagtgtgattaccacatctccacattcaatatattccctgaattatctgacgattttgatggctcactgttttcccaagtcttgaattgtcttctgtgcgccagtcaaatgcatatgtgttgagtttatcttttaaatatcaagcttttgtttttaacttttgtttgtaaccaaaaactcacagtaggagtttgatcacataattttatgtttgcctttgcaatttctagtgagtctttgattaaaagcttgaaaagaaaatgcagccaagcttaccaagtaagttatgtgtattaaccagaggaagagagaatcttgcaaaatttcaacaaacacaaaaagaagtattactacgattggtggagaaagaaaacgattccaaatcttgaactgttgttgtaaaagcatagcagaaagtgggagacaaccgaaatagaaatgactataacttaatttaatgttatcattataatttcttctagcaaatatttagaaagtaaatatcacatcaacctttaatgtaattaagctttctctttttgattcatgtgagatgaaaagaaaaaaaagaagagaaaagtgtagaaaacacatcatttctaagctgaagctgaggtacaaattaattaataagtgactagggtcacgtgaccctagtcacttatgattccgatgacttcgtaggttcctagctcaagccgctcgtgtccaagcgtcacttacgattagctaatgattacggcatctaggaccgactagttcttatgtgcttctagtctccaaatgtggttgatagttattttgctctaagatcaacagtaatgaagtataaatcatcgttgtggtgtgctactcggttaattgagcattaacacacacaaacatgacgaggatggtataatctccaaaaatgtgtactttgttaggtgggaccctatagccttgattaatgtgctatgttaggcatgcctggaaacgtgtgacgcatatgttttgtgaacctgttgatattatatgtgcttttatattaccatattttattaaaatactaatatttattactagtaagatataacattctatctagcttaaaaactaaccataaatattccataataactagatttaccaaactaatatactaaatatacataataaatacaaaattaacaagacaataatcaatatttatgagcttaatatatttagacattatggttggtcgacgataatcatgctaacttttcgtaattgcttgattgaaatatgcttagaataatgcctctttgttctacatggcaaatagggaccattatggtgtaacaccctgggaaccacaaacaccccgaaatgctactaaactacacaactaaccttcatatataaaatttcgacagcatctcctttgaaaatttgcatagacgtggaagcaacagagtataaacagatctagctagctaagtttaaacggccggccaaacgtgcaagcgctactagacaattcagtacattaaaaacgtccgcaatgtgttattaagttgtctaagcgtcaatttatttacaattgaatatatcctgcca

SEQ ID NO: 155 - DNA, 15352 bp, Artificial Sequence
  RV026526 T-DNA
caaacaaacatacacagcgatttattcacacgaacccgaattacaacggtatatatcctgtcagccaacaccaaaacatcaaaaaaatcgggatcaggatcaggatctgcggccgcatcctgcaggtttaaacggccggccttcactagctagctgctaagctcaaacgagcaggaagcaacgagagggtggcgcgcgaccgacgtgcgtacgtagcatgagcctgagtggagacgttggacgtgtatgtatatacctctctgcgtgttaactatgtacgtaagcggcaggcagtgcaataagtgtggctctgtagtatgtacgtgcgggtacgatgctgtaagctactgaggcaagtccataaataaataatgacacgtgcgtgttctataatctcttcgcttcttcatttgtccccttgcggagtttggcatccattgatgccgttacgctgagaacagacacagcagacgaaccaaaagtgagttcttgtatgaaactatgacccttcatcgctaggctcaaacagcaccccgtacgaacacagcaaattagtcatctaactattagcccctacatgtttcagacgatacataaatatagcccatccttagcaattagctattggccctgcccatcccaagcaatgatctcgaagtatttttaatatatagtatttttaatatgtagcttttaaaattagaagataattttgagacaaaaatctccaagtatttttttgggtattttttactgcctccgtttttctttatttctcgtcacctagtttaattttgtgctaatcggctataaacgaaacagagagaaaagttactctaaaagcaactccaacagattagatataaatcttatatcctgcctagagctgttaaaaagatagacaactttagtggattagtgtatgcaacaaactctccaaatttaagtatcccaactacccaacgcatatcgttcccttttcattggcgcacgaactttcacctgctatagccgacgtacatgttcgttttttttgggcggcgcttactttcttccccgttcgttctcagcatcgcaactcaatttgttatggcggagaagcccttgtatcccaggtagtaatgcacagatatgcattattattattcataaaatcgagctagttaccctatgaggtgacatgaagcgctcacggttactatgacggttagcttcacgactgttggtggcagtagcgtacgacttagctatagttccggacttacctaactgactagagtcacacttagctgaccctagtcacttaggcgcgccaagcttggatctcctgcaggatctggccggccggatgggcggatctcgtacctcaactttgtatagaaaagttgggccagaatggcccggaccgggttaccaagcggccgcgaattccagaagaccaaagggcaattgagacttttcaacaaagggtaatatcgggaaacctcctcggattccattgcccagctatctgtcacttcatcaaaaggacagtagaaaaggaaggtggcacctacaaatgccatcattgcgataaaggaaaggctatcgttcaagatgcctctgccgacagtggtcccaaagatggacccccacccacgaggagcatcgtggaaaaagaagacgttccaaccacgtcttcaaagcaagtggattgatgtgatatctccactgacgtaagggatgacgcacaatcccactatccttcgcaagacccttcctctatataaggaagttcatttcatttggagaggacccatggaacctcaacaacagctccagcagcagcagcaacaaaaccaacaacagccaaacgaggatagcggcagcagcaaaggcagttttctgtgcaggcaaagcagtacacgctggactcctacaactgaccagataagaatattgaaggacctttactacaacaatggagttaggtccccaagtgctgaacagattcagaggatctcagctaggctgaggcagtacggcaagatcgaaggcaagaacgtcttttattggtttcagaaccataaagctcgtgaaaggcagaagaagcgattcactactgatatgcccatgcaaagatcccttggaaatgccggttggagacctgatgatcccattcacaacaaatttcataccattcccactcctgggatatcttccccatcttcttcttcttcacccagtgtgcttgctgttgggcagatgggaagctttggatatggatctgtggagaggagttttacagactgttcaatatcagcaggtggtggtcgtggtggggttggtggatctataaaccagagcttcgaatgggttggcatggacccatattcttcatcttatgcactctttgacaagagaaaaacaatgggtgaaagcttcgaagaagagcaagaagaagaagcaactccggagattgaaacgctcccactctttcccatgcacgctgaggatatcactggcttttgcaacattaagcccgaatccgacgcctactactccggctggtacaggcccgccgacgccaagaccagttcccgcacttctcttgagcttagcctcaactcctacgccggcaggtccccggattccccctgaggtacctgacatcttatagtctgcaacctctcgtgtctgaattcctatctttatcaagtgttattgcttccacgactataggacagctttcgtcgaaaggttttgctcatgtgatctcgaaggattcatctagtctgatttttcgtgacttgtatcggttttattggattcatccaacatatatcaataaaaaatgagttgtgtttcctttcttcctagttcagttaaaattatttccctcctgcgcttgtgctgtaattgtctgtgtacctgttgtttgtgactgtgttagttcccttggatatgatttcgtatttgatatgtacatggagatagcttagcttcattattggagtatgaagttagtatgacatagtcactctcctggaaaattgacactgcaaaccatatttttattctgaaccacaaatcctagtcagtccgctggcatatgccgtccgtttgctgaatccagaacgtgggtttggagatgtacggctgagatgcctctatgcgaaggggatttcgtggtgaaacgagatgggagtagagcaacgcccgtggaagatgcttcaaacttccacacttttgagcaacgatcggcagtagtaaggtagacgatttcaagatcaaagcatatgaagataaacaacatcaacaacaaaatttgttggggttctatagagagaaacagagctacatacatacactgttttgtatctaccatctgagatgatgaaaagatgaaaaactaaagaatgccccggcgccaacgccaggacacgccgcgcgcgcgtcacccgagccatctcttgacccagccggcgctgtatatttacacacgttgcagcatcgatcaccacctgttcgatcgcgtcgccgtcaccaagcttggcgcgccggtcacccggtccgggcctagaaggccacccggggctcggcgttaggcttttagtccgctaggtggctagaccgaggttaggacgctagttcactaggggcctagtggtgttttaaggatgggcaagtttgtacaaaaaagcaggctggcgccggaaccaattcagtcgagtgcggccgccagtgtgatggatatctcgacccgggtgattgcggttacatcatgtacggaaaaataattctaatccttgatttaaatttgaacttgactatttatttattctttatttcattttgtaaatcattttatgtatctcctggcaagcaattttatccaccttgcaccaacaccttcgggttccataatcaaaccaccttaacttcacaccatgctgtaactcacaccgcccagcatctccaatgtgaaagaagctaaaatttaataaacaatcatacgaagcagtgacaaaataccagatggtattaatgcttcgataaaattaattggaaagtataaaatggtagaaaataataaattataattaatttaagtaagataaaaaataattaaaaactaaaatgttaaaattttaaaaaaattattttaaataatatttaaaaacattaaaaatcattttaaaaaatttatttatagaacaattaaataaatatttcagctaataaaaaacaaaagcttacctagccttagaagacaacttgtccaacaattagatgatacccattgcccttacgttttctttaacatcaattattgtttttgtcaacaagctatcttttagttttattttattggtaaaaaatatgtcgccttcaagttgcatcatttaacacatctcgtcattagaaaaataaaactcttccctaaacgattagtagaaaaaatcattcgataataaataagaaagaaaaattagaaaaaaataacttcattttaaaaaaatcattaaggctatattttttaaatgactaattttatatagactgtaactaaaagtatacaatttattatgctatgtatcttaaagaattacttataaaaatctacggaagaatatcttacaaagtgaaaaacaaatgagaaagaatttagtgggatgattatgattttatttgaaaattgaaaaaataattattaaagactttagtggagtaagaaagctttcctattagtcttttcttatccataaaaaaaaaaaaaaaaatctagcgtgacagcttttccatagattttaataatgtaaaatactggtagcagccgaccgttcaggtaatggacactgtggtcctaacttgcaacgggtgcgggcccaatttaataacgccgtggtaacggataaagccaagcgtgaagcggtgaaggtacatctctgactccgtcaagattacgaaaccgtcaactacgaaggactccccgaaatatcatctgtgtcataaacaccaagtcacaccatacatgggcacgcgtcacaatatgattggagaacggttccaccgcatatgctataaaatgcccccacacccctcgaccctaatcgcacttcaattgcaatcaaattagttcattctctttgcgcagttccctacctctcctttcaaggttcgtagatttcttccgtttttttttcttcttctttattgtttgttctacatcagcatgatgttgatttgattgtgttttctatcgtttcatcgattataaattttcataatcagaagattcagcttttattaatgcaagaacgtccttaattgatgattttataaccgtaaattaggtctaattagagtttttttcataaagattttcagatccgtttacaacaagccttaattgttgattctgtagtcgtagattaaggtttttttcatgaactacttcagatccgttaaacaacagccttatttgttgatacttcagtcgtttttcaagaaattgttcagatccgttgataaaagccttattcgttgattctgtatggtatttcaagagatattgctcaggtcctttagcaactaccttatttgttgattctgtggccatagattaggattttttttcacgaaattgcttcttgaaattacgtgatggattttgattctgatttatcttgtgattgttgactctacagccatggcccacagcaagcacggcctgaaggaggagatgaccatgaagtaccacatggagggctgcgtgaacggccacaagttcgtgatcaccggcgagggcatcggctaccccttcaagggcaagcagaccatcaacctgtgcgtgatcgagggcggccccctgcccttcagcgaggacatcctgagcgccggcttcaagtacggcgaccggatcttcaccgagtacccccaggacatcgtggactacttcaagaacagctgccccgccggctacacctggggccggagcttcctgttcgaggacggcgccgtgtgcatctgtaacgtggacatcaccgtgagcgtgaaggagaactgcatctaccacaagagcatcttcaacggcgtgaacttccccgccgacggccccgtgatgaagaagatgaccaccaactgggaggccagctgcgagaagatcatgcccgtgcctaagcagggcatcctgaagggcgacgtgagcatgtacctgctgctgaaggacggcggccggtaccggtgccagttcgacaccgtgtacaaggccaagagcgtgcccagcaagatgcccgagtggcacttcatccagcacaagctgctgcgggaggaccggagcgacgccaagaaccagaagtggcagctgaccgagcacgccatcgccttccccagcgccctggcctgagagctcgaatttccccgatcgttcaaacatttggcaataaagtttcttaagattgaatcctgttgccggtcttgcgatgattatcatataatttctgttgaattacgttaagcatgtaataattaacatgtaatgcatgacgttatttatgagatgggtttttatgattagagtcccgcaattatacatttaatacgcgatagaaaacaaaatatagcgcgcaaactaggataaattatcgcgcgcggtgtcatctatgttactagatcgggaattctagtggccggcccagctgatatctagacccagctttcttgtacaaagtggccgttaacggatcggccagaatggcccggaccgggttaccgaattcgagctcggtaccctgggatccgatatcgatgggccctggccgaagcttggtcacccggtccgggcctagaaggccagcttcggccgccccgggcaactttattatacaaagttgatggtacggatccgtcgacggcgcgccgcggacctgaattccagcacactggcggccgttagtctaaaaacggcccctaactaacgcttagttgcccgctagattagtcccccgttagtgcctagttagacacacgacgaactaggggctactagtaacggccgccagtgtgctcggtacggccagaatggccatctggattcagcagggggtgattgcggttacatcatgtacggaaaaataattctaatccttgatttaaatttgaacttgactatttatttattctttatttcattttgtaaatcattttatgtatctcctggcaagcaattttatccaccttgcaccaacaccttcgggttccataatcaaaccaccttaacttcacaccatgctgtaactcacaccgcccagcatctccaatgtgaaagaagctaaaatttaataaacaatcatacgaagcagtgacaaaataccagatggtattaatgcttcgataaaattaattggaaagtataaaatggtagaaaataataaattataattaatttaagtaagataaaaaataattaaaaactaaaatgttaaaattttaaaaaaattattttaaataatatttaaaaacattaaaaatcattttaaaaaatttatttatagaacaattaaataaatatttcagctaataaaaaacaaaagcttacctagccttagaagacaacttgtccaacaattagatgatacccattgcccttacgttttctttaacatcaattattgtttttgtcaacaagctatcttttagttttattttattggtaaaaaatatgtcgccttcaagttgcatcatttaacacatctcgtcattagaaaaataaaactcttccctaaacgattagtagaaaaaatcattcgataataaataagaaagaaaaattagaaaaaaataacttcattttaaaaaaatcattaaggctatattttttaaatgactaattttatatagactgtaactaaaagtatacaatttattatgctatgtatcttaaagaattacttataaaaatctacggaagaatatcttacaaagtgaaaaacaaatgagaaagaatttagtgggatgattatgattttatttgaaaattgaaaaaataattattaaagactttagtggagtaagaaagctttcctattagtcttttcttatccataaaaaaaaaaaaaaaaatctagcgtgacagcttttccatagattttaataatgtaaaatactggtagcagccgaccgttcaggtaatggacactgtggtcctaacttgcaacgggtgcgggcccaatttaataacgccgtggtaacggataaagccaagcgtgaagcggtgaaggtacatctctgactccgtcaagattacgaaaccgtcaactacgaaggactccccgaaatatcatctgtgtcataaacaccaagtcacaccatacatgggcacgcgtcacaatatgattggagaacggttccaccgcatatgctataaaatgcccccacacccctcgaccctaatcgcacttcaattgcaatcaaattagttcattctctttgcgcagttccctacctctcctttcaaggttcgtagatttcttccgtttttttttcttcttctttattgtttgttctacatcagcatgatgttgatttgattgtgttttctatcgtttcatcgattataaattttcataatcagaagattcagcttttattaatgcaagaacgtccttaattgatgattttataaccgtaaattaggtctaattagagtttttttcataaagattttcagatccgtttacaacaagccttaattgttgattctgtagtcgtagattaaggtttttttcatgaactacttcagatccgttaaacaacagccttatttgttgatacttcagtcgtttttcaagaaattgttcagatccgttgataaaagccttattcgttgattctgtatggtatttcaagagatattgctcaggtcctttagcaactaccttatttgttgattctgtggccatagattaggattttttttcacgaaattgcttcttgaaattacgtgatggattttgattctgatttatcttgtgattgttgactctacagccatggctgcaactactcttacatctgctttacctggtgctttcagttcatcccagagaccaagtgctcctttcaacttacaaagatcacctagagtgcttagaaggttcaacagaaagacaggacgtcaacctcgtggacttgttcgtgctgcaaaggctcaagcggcgcaaaacctgccagagaaattcgatgaaacaagactctgggaggccctcaggggatttggggttagtccaagtagggttacttacgctcccgtcggattcggagattaccactggaccgtcacagatgaagacgggagaccttggttcgcaactgtcagtgacctcgaacacaaagagcattgcgggcagggagcacaagcagcccttaaaggactcagacaagctatggacactgccctcgcacttagagatagggacggactcagattcgtggttgctccagtggcagcaacagatgggggtggccctgtccttccccttgacgctaggtatgcactcacagtcttccctcacgtcccaggaagaacaggagagttcggacaaagactcacagaggcagagagggacagactgcttgctcttctggcagaactccacggaagaacacctcctgaaacaaccccaccagccgatatggaaccaccaggacttcctggtgttagagcagcactcgccgaaagtgaaggaccttggagtggaggaccatttgcagaacccgctagacttcttctcagagaacacgaggccacactgcacgcaagactcgctgaattcgaagccctcgtcgcaagagttaagggtcgtggagcacctcttgtcgttacccacggagaaccacacccaggcaacttgatcctcggagaggaaggctatctcctcgtggactgggatacagttggactggctccagctgaaagggatttgagtctcatctcagacgacccagctgacctcgcaagatacgcagagcttacaggaagaactccagacccagacgcactcgcactctatagactgcgttggagtctccttgatgtggctgagttcgtcgagtggttcagggctgaacaccaaagaacccaagacaccgagagtgcatggaaggggttcactgacacacttgggcaattggctgctggtggatcagctgcatagcaaacttatctctgttatgaatcagaagaagttcatgtctcgtttcatttaaaactttggtggtttgtgttttggggccttgtaaagcccctgatgaataattgttcaactatgtttccgttcctgtgttatacctttctttctaatgagtaatgacatcaaacttcttctgtattgaaattatgtccttgtgagtctctttatcatcgtttcgtctttacattatatgtgctacttttgtctaatgagcctgaaaagtggctccaatggtacgcactggaagatttgttggcttctggtagatatagcgacagtgttgagcttgtaatatcatgtctcttattgctaaattagttcctttcttaacagaaaccttcaaagtttttgtttttgttttcatttacctaatgtacacatacgctggccatgactaacaacatgtccaggcttagagcatatttttttctagcttaaattgttaacttgtcattcagtaaaatccgagaattgtgaagctctaattgaagctaattcgttttataaagtcagttaaaaagtatactaaattatccaacttttcttcaaaatctcaaaattctatgacaaaacgatagtctttgtttatgtcagtaccacaaagaggtggaaaaaaacaccaaaaaaacaataagcaaactatacactgagaagaaaaataaaagagagctcaatagatgttttatactaacggtagattagatcaaagatccaagctttactctacatagagcagaacccagaatcccttcatatctcttttattctagcaccgataatctactgaaaagaagacacttagagctctgtctctttgtcaaagaagtcccagccgtcatccagaagctccttacgttcattaacagaggccgcaattggatcgggtttacttattttgtgggtatctatacttttattagatttttaatcaggctcctgatttctttttatttcgattgaattcctgaacttgtattattcagtagatcgaataaattataaaaagataaaatcataaaataatattttatcctatcaatcatattaaagcaatgaatatgtaaaattaatcttatctttattttaaaaaatcatataggtttagtatttttttaaaaataaagataggattagttttactattcactgcttattacttttaaaaaaatcataaaggtttagtatttttttaaaataaatataggaatagttttactattcactgctttaatagaaaaatagtttaaaatttaagatagttttaatcccagcatttgccacgtttgaacgtgagccgaaacgatgtcgttacattatcttaacctagctgaaacgatgtcgtcataatatcgccaaatgccaactggactacgtcgaacccacaaatcccacaaagcgcgtgaaatcaaatcgctcaaaccacaaaaaagaacaacgcgtttgttacacgctcaatcccacgcgagtagagcacagtaaccttcaaataagcgaatggggcataatcagaaatccgaaataaacctaggggcattatcggaaatgaaaagtagctcactcaatataaaaatctaggaaccctagttttcgttatcactctgtgctccctcgctctatttctcagtctctgtgtttgcggctgaggattccgaacgagtgaccttcttcgtttctcgcaaaggtaacagcctctgctcttgtctcttcgattcgatctatgcctgtctcttatttacgatgatgtttcttcggttatgtttttttatttatgctttatgctgttgatgttcggttgtttgtttcgctttgtttttgtggttcagttttttaggattcttttggtttttgaatcgattaatcggaagagattttcgagttatttggtgtgttggaggtgaatcttttttttgaggtcatagatctgttgtatttgtgttataaacatgcgactttgtatgattttttacgaggttatgatgttctggttgttttattatgaatctgttgagacagaaccatgatttttgttgatgttcgtttacactattaaaggtttgttttaacaggattaaaagttttttaagcatgttgaaggagtcttgtagatatgtaaccgtcgatagtttttttgtgggtttgttcacatgttatcaagcttaatcttttactatgtatgcgaccatatctggatccagcaaaggcgattttttaattccttgtgaaacttttgtaatatgaagttgaaattttgttattggtaaactataaatgtgtgaagttggagtatacctttaccttcttatttggctttgtgatagtttaatttatatgtattttgagttctgacttgtatttctttgaattgattctagtttaagtaatcatggcctcctccgagaacgtcatcaccgagttcatgcgcttcaaggtgcgcatggagggcaccgtgaacggccacgagttcgagatcgagggcgagggcgagggccgcccctacgagggccacaacaccgtgaagctgaaggtgacgaagggcggccccctgcccttcgcctgggacatcctgtccccccagttccagtacggctccaaggtgtacgtgaagcaccccgccgacatccccgactacaagaagctgtccttccccgagggcttcaagtgggagcgcgtgatgaacttcgaggacggcggcgtggcgaccgtgacccaggactcctccctgcaggacggctgcttcatctacaaggtgaagttcatcggcgtgaacttcccctccgacggccccgtgatgcagaagaagaccatgggctgggaggcctccaccgagcgcctgtacccccgcgacggcgtgctgaagggcgagacccacaaggccctgaagctgaaggacggcggccactacctggtggagttcaagtccatctacatggccaagaagcccgtgcagctgcccggctactactacgtggacgccaagctggacatcacctcccacaacgaggactacaccatcgtggagcagtacgagcgcaccgagggccgccaccacctgttcctgtagttttgtgatctgatgataagtggttggttcgtgtctcatgcacttgggaggtgatctatttcacctggtgtagtttgtgtttccgtcagttggaaaaacttatccctatcgatttcgttttcattttctgcttttcttttatgtaccttcgtttgggcttgtaacgggcctttgtatttcaactctcaataataatccaagtgcatgttaaacaatttgtcatctgtttcggctttgatatactactggtgaagatgggccgtactactgcatcacaacgaaaaataataataagatgaaaaacttgaagtggaaaaaaaaaaaaacttgaatgttcactactactcattgaccataatgtttaacatacatagctcaatagtatttttgtgaatatggcaacacaaacagtccaaaacaattgtctcttactataccaaaccaagggcgccgcttgtttgccactctttgtgtgcaatagtgtgattaccacatctccacattcaatatattccctgaattatctgacgattttgatggctcactgttttcccaagtcttgaattgtcttctgtgcgccagtcaaatgcatatgtgttgagtttatcttttaaatatcaagcttttgtttttaacttttgtttgtaaccaaaaactcacagtaggagtttgatcacataattttatgtttgcctttgcaatttctagtgagtctttgattaaaagcttgaaaagaaaatgcagccaagcttaccaagtaagttatgtgtattaaccagaggaagagagaatcttgcaaaatttcaacaaacacaaaaagaagtattactacgattggtggagaaagaaaacgattccaaatcttgaactgttgttgtaaaagcatagcagaaagtgggagacaaccgaaatagaaatgactataacttaatttaatgttatcattataatttcttctagcaaatatttagaaagtaaatatcacatcaacctttaatgtaattaagctttctctttttgattcatgtgagatgaaaagaaaaaaaagaagagaaaagtgtagaaaacacatcatttctaagctgaagctgaggtacaaattaattaataagtgactagggtcacgtgaccctagtcacttatgattccgatgacttcgtaggttcctagctcaagccgctcgtgtccaagcgtcacttacgattagctaatgattacggcatctaggaccgactagttcttatgtgcttctagtctccaaatgtggttgatagttattttgctctaagatcaacagtaatgaagtataaatcatcgttgtggtgtgctactcggttaattgagcattaacacacacaaacatgacgaggatggtataatctccaaaaatgtgtactttgttaggtgggaccctatagccttgattaatgtgctatgttaggcatgcctggaaacgtgtgacgcatatgttttgtgaacctgttgatattatatgtgcttttatattaccatattttattaaaatactaatatttattactagtaagatataacattctatctagcttaaaaactaaccataaatattccataataactagatttaccaaactaatatactaaatatacataataaatacaaaattaacaagacaataatcaatatttatgagcttaatatatttagacattatggttggtcgacgataatcatgctaacttttcgtaattgcttgattgaaatatgcttagaataatgcctctttgttctacatggcaaatagggaccattatggtgtaacaccctgggaaccacaaacaccccgaaatgctactaaactacacaactaaccttcatatataaaatttcgacagcatctcctttgaaaatttgcatagacgtggaagcaacagagtataaacagatctagctagctaagtttaaacggccggccaaacgtgcaagcgctactagacaattcagtacattaaaaacgtccgcaatgtgttattaagttgtctaagcgtcaatttatttacaattgaatatatcctgcca

SEQ ID NO: 156 - DNA, 15433 bp, Artificial Sequence
  RV026534 T-DNA
caaacaaacatacacagcgatttattcacacgaacccgaattacaacggtatatatcctgtcagccaacaccaaaacatcaaaaaaatcgggatcaggatcaggatctgcggccgcatcctgcaggtttaaacggccggccttcactagctagctgctaagctcaaacgagcaggaagcaacgagagggtggcgcgcgaccgacgtgcgtacgtagcatgagcctgagtggagacgttggacgtgtatgtatatacctctctgcgtgttaactatgtacgtaagcggcaggcagtgcaataagtgtggctctgtagtatgtacgtgcgggtacgatgctgtaagctactgaggcaagtccataaataaataatgacacgtgcgtgttctataatctcttcgcttcttcatttgtccccttgcggagtttggcatccattgatgccgttacgctgagaacagacacagcagacgaaccaaaagtgagttcttgtatgaaactatgacccttcatcgctaggctcaaacagcaccccgtacgaacacagcaaattagtcatctaactattagcccctacatgtttcagacgatacataaatatagcccatccttagcaattagctattggccctgcccatcccaagcaatgatctcgaagtatttttaatatatagtatttttaatatgtagcttttaaaattagaagataattttgagacaaaaatctccaagtatttttttgggtattttttactgcctccgtttttctttatttctcgtcacctagtttaattttgtgctaatcggctataaacgaaacagagagaaaagttactctaaaagcaactccaacagattagatataaatcttatatcctgcctagagctgttaaaaagatagacaactttagtggattagtgtatgcaacaaactctccaaatttaagtatcccaactacccaacgcatatcgttcccttttcattggcgcacgaactttcacctgctatagccgacgtacatgttcgttttttttgggcggcgcttactttcttccccgttcgttctcagcatcgcaactcaatttgttatggcggagaagcccttgtatcccaggtagtaatgcacagatatgcattattattattcataaaatcgagctagttaccctatgaggtgacatgaagcgctcacggttactatgacggttagcttcacgactgttggtggcagtagcgtacgacttagctatagttccggacttacctaactgactagagtcacacttagctgaccctagtcacttaggcgcgccaagcttggatctcctgcaggatctggccggccggatgggcggatctcgtacctcaactttgtatagaaaagttgggccagaatggcccggaccgggttaccaagcggccgcgaattccagaagaccaaagggcaattgagacttttcaacaaagggtaatatcgggaaacctcctcggattccattgcccagctatctgtcacttcatcaaaaggacagtagaaaaggaaggtggcacctacaaatgccatcattgcgataaaggaaaggctatcgttcaagatgcctctgccgacagtggtcccaaagatggacccccacccacgaggagcatcgtggaaaaagaagacgttccaaccacgtcttcaaagcaagtggattgatgtgatatctccactgacgtaagggatgacgcacaatcccactatccttcgcaagacccttcctctatataaggaagttcatttcatttggagaggacccatggaaacagcacagcaccagcagaacaaccaacagcactacctccaccaacacctctccatcggacaaggaacaaacatcgaggacggcagtaacaagaacaactcctccaacttcatgtgcaggcaaaatagtacccgctggacaccaaccactgaccagatcaggatattaaaggacctctactacaacaacggagtcagatcacctaccgctgaacagatccagagaatctccgccaagctcaggcagtacggcaagatcgagggcaagaacgtcttctactggttccagaaccataaagcccgcgagagacaaaagaagcgcctcatcgccgcagccaccaccgataacactaacctcccaatgcagatgcagttccagagaggagtctggagatcctctgcagacgaccccatccaccacaagtatactaatccaggagtgcactgcccttcagcttcttcccacggagttctcgcagtcggacagaacggcaatcacggatacggagccttggcaatggaaaaatccttccgcgactgctccatcagtccaggcagttccatgtcacaccaccaccaccaaaacttcgcttgggcaggagtcgatccttattcctcaaccacaacctaccctttcctcgagaagaccaagcacttcgagaatgaaaccctcgaagctgatgaagagcagcaagaggaggaccaggagaactactactaccaaaggaccacctctgccatcgaaaccctgcctctcttccctatgcacgaggagaacatctcctccttctgcaacctcaagcaccaggagtcatccggaggattctacaccgagtggtacagagcagacgacaacctcgcagcagccagagcttccctcgagctctccttgaactccttcatcggcaactcctcctagggtacctgacatcttatagtctgcaacctctcgtgtctgaattcctatctttatcaagtgttattgcttccacgactataggacagctttcgtcgaaaggttttgctcatgtgatctcgaaggattcatctagtctgatttttcgtgacttgtatcggttttattggattcatccaacatatatcaataaaaaatgagttgtgtttcctttcttcctagttcagttaaaattatttccctcctgcgcttgtgctgtaattgtctgtgtacctgttgtttgtgactgtgttagttcccttggatatgatttcgtatttgatatgtacatggagatagcttagcttcattattggagtatgaagttagtatgacatagtcactctcctggaaaattgacactgcaaaccatatttttattctgaaccacaaatcctagtcagtccgctggcatatgccgtccgtttgctgaatccagaacgtgggtttggagatgtacggctgagatgcctctatgcgaaggggatttcgtggtgaaacgagatgggagtagagcaacgcccgtggaagatgcttcaaacttccacacttttgagcaacgatcggcagtagtaaggtagacgatttcaagatcaaagcatatgaagataaacaacatcaacaacaaaatttgttggggttctatagagagaaacagagctacatacatacactgttttgtatctaccatctgagatgatgaaaagatgaaaaactaaagaatgccccggcgccaacgccaggacacgccgcgcgcgcgtcacccgagccatctcttgacccagccggcgctgtatatttacacacgttgcagcatcgatcaccacctgttcgatcgcgtcgccgtcaccaagcttggcgcgccggtcacccggtccgggcctagaaggccacccggggctcggcgttaggcttttagtccgctaggtggctagaccgaggttaggacgctagttcactaggggcctagtggtgttttaaggatgggcaagtttgtacaaaaaagcaggctggcgccggaaccaattcagtcgagtgcggccgccagtgtgatggatatctcgacccgggtgattgcggttacatcatgtacggaaaaataattctaatccttgatttaaatttgaacttgactatttatttattctttatttcattttgtaaatcattttatgtatctcctggcaagcaattttatccaccttgcaccaacaccttcgggttccataatcaaaccaccttaacttcacaccatgctgtaactcacaccgcccagcatctccaatgtgaaagaagctaaaatttaataaacaatcatacgaagcagtgacaaaataccagatggtattaatgcttcgataaaattaattggaaagtataaaatggtagaaaataataaattataattaatttaagtaagataaaaaataattaaaaactaaaatgttaaaattttaaaaaaattattttaaataatatttaaaaacattaaaaatcattttaaaaaatttatttatagaacaattaaataaatatttcagctaataaaaaacaaaagcttacctagccttagaagacaacttgtccaacaattagatgatacccattgcccttacgttttctttaacatcaattattgtttttgtcaacaagctatcttttagttttattttattggtaaaaaatatgtcgccttcaagttgcatcatttaacacatctcgtcattagaaaaataaaactcttccctaaacgattagtagaaaaaatcattcgataataaataagaaagaaaaattagaaaaaaataacttcattttaaaaaaatcattaaggctatattttttaaatgactaattttatatagactgtaactaaaagtatacaatttattatgctatgtatcttaaagaattacttataaaaatctacggaagaatatcttacaaagtgaaaaacaaatgagaaagaatttagtgggatgattatgattttatttgaaaattgaaaaaataattattaaagactttagtggagtaagaaagctttcctattagtcttttcttatccataaaaaaaaaaaaaaaaatctagcgtgacagcttttccatagattttaataatgtaaaatactggtagcagccgaccgttcaggtaatggacactgtggtcctaacttgcaacgggtgcgggcccaatttaataacgccgtggtaacggataaagccaagcgtgaagcggtgaaggtacatctctgactccgtcaagattacgaaaccgtcaactacgaaggactccccgaaatatcatctgtgtcataaacaccaagtcacaccatacatgggcacgcgtcacaatatgattggagaacggttccaccgcatatgctataaaatgcccccacacccctcgaccctaatcgcacttcaattgcaatcaaattagttcattctctttgcgcagttccctacctctcctttcaaggttcgtagatttcttccgtttttttttcttcttctttattgtttgttctacatcagcatgatgttgatttgattgtgttttctatcgtttcatcgattataaattttcataatcagaagattcagcttttattaatgcaagaacgtccttaattgatgattttataaccgtaaattaggtctaattagagtttttttcataaagattttcagatccgtttacaacaagccttaattgttgattctgtagtcgtagattaaggtttttttcatgaactacttcagatccgttaaacaacagccttatttgttgatacttcagtcgtttttcaagaaattgttcagatccgttgataaaagccttattcgttgattctgtatggtatttcaagagatattgctcaggtcctttagcaactaccttatttgttgattctgtggccatagattaggattttttttcacgaaattgcttcttgaaattacgtgatggattttgattctgatttatcttgtgattgttgactctacagccatggcccacagcaagcacggcctgaaggaggagatgaccatgaagtaccacatggagggctgcgtgaacggccacaagttcgtgatcaccggcgagggcatcggctaccccttcaagggcaagcagaccatcaacctgtgcgtgatcgagggcggccccctgcccttcagcgaggacatcctgagcgccggcttcaagtacggcgaccggatcttcaccgagtacccccaggacatcgtggactacttcaagaacagctgccccgccggctacacctggggccggagcttcctgttcgaggacggcgccgtgtgcatctgtaacgtggacatcaccgtgagcgtgaaggagaactgcatctaccacaagagcatcttcaacggcgtgaacttccccgccgacggccccgtgatgaagaagatgaccaccaactgggaggccagctgcgagaagatcatgcccgtgcctaagcagggcatcctgaagggcgacgtgagcatgtacctgctgctgaaggacggcggccggtaccggtgccagttcgacaccgtgtacaaggccaagagcgtgcccagcaagatgcccgagtggcacttcatccagcacaagctgctgcgggaggaccggagcgacgccaagaaccagaagtggcagctgaccgagcacgccatcgccttccccagcgccctggcctgagagctcgaatttccccgatcgttcaaacatttggcaataaagtttcttaagattgaatcctgttgccggtcttgcgatgattatcatataatttctgttgaattacgttaagcatgtaataattaacatgtaatgcatgacgttatttatgagatgggtttttatgattagagtcccgcaattatacatttaatacgcgatagaaaacaaaatatagcgcgcaaactaggataaattatcgcgcgcggtgtcatctatgttactagatcgggaattctagtggccggcccagctgatatctagacccagctttcttgtacaaagtggccgttaacggatcggccagaatggcccggaccgggttaccgaattcgagctcggtaccctgggatccgatatcgatgggccctggccgaagcttggtcacccggtccgggcctagaaggccagcttcggccgccccgggcaactttattatacaaagttgatggtacggatccgtcgacggcgcgccgcggacctgaattccagcacactggcggccgttagtctaaaaacggcccctaactaacgcttagttgcccgctagattagtcccccgttagtgcctagttagacacacgacgaactaggggctactagtaacggccgccagtgtgctcggtacggccagaatggccatctggattcagcagggggtgattgcggttacatcatgtacggaaaaataattctaatccttgatttaaatttgaacttgactatttatttattctttatttcattttgtaaatcattttatgtatctcctggcaagcaattttatccaccttgcaccaacaccttcgggttccataatcaaaccaccttaacttcacaccatgctgtaactcacaccgcccagcatctccaatgtgaaagaagctaaaatttaataaacaatcatacgaagcagtgacaaaataccagatggtattaatgcttcgataaaattaattggaaagtataaaatggtagaaaataataaattataattaatttaagtaagataaaaaataattaaaaactaaaatgttaaaattttaaaaaaattattttaaataatatttaaaaacattaaaaatcattttaaaaaatttatttatagaacaattaaataaatatttcagctaataaaaaacaaaagcttacctagccttagaagacaacttgtccaacaattagatgatacccattgcccttacgttttctttaacatcaattattgtttttgtcaacaagctatcttttagttttattttattggtaaaaaatatgtcgccttcaagttgcatcatttaacacatctcgtcattagaaaaataaaactcttccctaaacgattagtagaaaaaatcattcgataataaataagaaagaaaaattagaaaaaaataacttcattttaaaaaaatcattaaggctatattttttaaatgactaattttatatagactgtaactaaaagtatacaatttattatgctatgtatcttaaagaattacttataaaaatctacggaagaatatcttacaaagtgaaaaacaaatgagaaagaatttagtgggatgattatgattttatttgaaaattgaaaaaataattattaaagactttagtggagtaagaaagctttcctattagtcttttcttatccataaaaaaaaaaaaaaaaatctagcgtgacagcttttccatagattttaataatgtaaaatactggtagcagccgaccgttcaggtaatggacactgtggtcctaacttgcaacgggtgcgggcccaatttaataacgccgtggtaacggataaagccaagcgtgaagcggtgaaggtacatctctgactccgtcaagattacgaaaccgtcaactacgaaggactccccgaaatatcatctgtgtcataaacaccaagtcacaccatacatgggcacgcgtcacaatatgattggagaacggttccaccgcatatgctataaaatgcccccacacccctcgaccctaatcgcacttcaattgcaatcaaattagttcattctctttgcgcagttccctacctctcctttcaaggttcgtagatttcttccgtttttttttcttcttctttattgtttgttctacatcagcatgatgttgatttgattgtgttttctatcgtttcatcgattataaattttcataatcagaagattcagcttttattaatgcaagaacgtccttaattgatgattttataaccgtaaattaggtctaattagagtttttttcataaagattttcagatccgtttacaacaagccttaattgttgattctgtagtcgtagattaaggtttttttcatgaactacttcagatccgttaaacaacagccttatttgttgatacttcagtcgtttttcaagaaattgttcagatccgttgataaaagccttattcgttgattctgtatggtatttcaagagatattgctcaggtcctttagcaactaccttatttgttgattctgtggccatagattaggattttttttcacgaaattgcttcttgaaattacgtgatggattttgattctgatttatcttgtgattgttgactctacagccatggctgcaactactcttacatctgctttacctggtgctttcagttcatcccagagaccaagtgctcctttcaacttacaaagatcacctagagtgcttagaaggttcaacagaaagacaggacgtcaacctcgtggacttgttcgtgctgcaaaggctcaagcggcgcaaaacctgccagagaaattcgatgaaacaagactctgggaggccctcaggggatttggggttagtccaagtagggttacttacgctcccgtcggattcggagattaccactggaccgtcacagatgaagacgggagaccttggttcgcaactgtcagtgacctcgaacacaaagagcattgcgggcagggagcacaagcagcccttaaaggactcagacaagctatggacactgccctcgcacttagagatagggacggactcagattcgtggttgctccagtggcagcaacagatgggggtggccctgtccttccccttgacgctaggtatgcactcacagtcttccctcacgtcccaggaagaacaggagagttcggacaaagactcacagaggcagagagggacagactgcttgctcttctggcagaactccacggaagaacacctcctgaaacaaccccaccagccgatatggaaccaccaggacttcctggtgttagagcagcactcgccgaaagtgaaggaccttggagtggaggaccatttgcagaacccgctagacttcttctcagagaacacgaggccacactgcacgcaagactcgctgaattcgaagccctcgtcgcaagagttaagggtcgtggagcacctcttgtcgttacccacggagaaccacacccaggcaacttgatcctcggagaggaaggctatctcctcgtggactgggatacagttggactggctccagctgaaagggatttgagtctcatctcagacgacccagctgacctcgcaagatacgcagagcttacaggaagaactccagacccagacgcactcgcactctatagactgcgttggagtctccttgatgtggctgagttcgtcgagtggttcagggctgaacaccaaagaacccaagacaccgagagtgcatggaaggggttcactgacacacttgggcaattggctgctggtggatcagctgcatagcaaacttatctctgttatgaatcagaagaagttcatgtctcgtttcatttaaaactttggtggtttgtgttttggggccttgtaaagcccctgatgaataattgttcaactatgtttccgttcctgtgttatacctttctttctaatgagtaatgacatcaaacttcttctgtattgaaattatgtccttgtgagtctctttatcatcgtttcgtctttacattatatgtgctacttttgtctaatgagcctgaaaagtggctccaatggtacgcactggaagatttgttggcttctggtagatatagcgacagtgttgagcttgtaatatcatgtctcttattgctaaattagttcctttcttaacagaaaccttcaaagtttttgtttttgttttcatttacctaatgtacacatacgctggccatgactaacaacatgtccaggcttagagcatatttttttctagcttaaattgttaacttgtcattcagtaaaatccgagaattgtgaagctctaattgaagctaattcgttttataaagtcagttaaaaagtatactaaattatccaacttttcttcaaaatctcaaaattctatgacaaaacgatagtctttgtttatgtcagtaccacaaagaggtggaaaaaaacaccaaaaaaacaataagcaaactatacactgagaagaaaaataaaagagagctcaatagatgttttatactaacggtagattagatcaaagatccaagctttactctacatagagcagaacccagaatcccttcatatctcttttattctagcaccgataatctactgaaaagaagacacttagagctctgtctctttgtcaaagaagtcccagccgtcatccagaagctccttacgttcattaacagaggccgcaattggatcgggtttacttattttgtgggtatctatacttttattagatttttaatcaggctcctgatttctttttatttcgattgaattcctgaacttgtattattcagtagatcgaataaattataaaaagataaaatcataaaataatattttatcctatcaatcatattaaagcaatgaatatgtaaaattaatcttatctttattttaaaaaatcatataggtttagtatttttttaaaaataaagataggattagttttactattcactgcttattacttttaaaaaaatcataaaggtttagtatttttttaaaataaatataggaatagttttactattcactgctttaatagaaaaatagtttaaaatttaagatagttttaatcccagcatttgccacgtttgaacgtgagccgaaacgatgtcgttacattatcttaacctagctgaaacgatgtcgtcataatatcgccaaatgccaactggactacgtcgaacccacaaatcccacaaagcgcgtgaaatcaaatcgctcaaaccacaaaaaagaacaacgcgtttgttacacgctcaatcccacgcgagtagagcacagtaaccttcaaataagcgaatggggcataatcagaaatccgaaataaacctaggggcattatcggaaatgaaaagtagctcactcaatataaaaatctaggaaccctagttttcgttatcactctgtgctccctcgctctatttctcagtctctgtgtttgcggctgaggattccgaacgagtgaccttcttcgtttctcgcaaaggtaacagcctctgctcttgtctcttcgattcgatctatgcctgtctcttatttacgatgatgtttcttcggttatgtttttttatttatgctttatgctgttgatgttcggttgtttgtttcgctttgtttttgtggttcagttttttaggattcttttggtttttgaatcgattaatcggaagagattttcgagttatttggtgtgttggaggtgaatcttttttttgaggtcatagatctgttgtatttgtgttataaacatgcgactttgtatgattttttacgaggttatgatgttctggttgttttattatgaatctgttgagacagaaccatgatttttgttgatgttcgtttacactattaaaggtttgttttaacaggattaaaagttttttaagcatgttgaaggagtcttgtagatatgtaaccgtcgatagtttttttgtgggtttgttcacatgttatcaagcttaatcttttactatgtatgcgaccatatctggatccagcaaaggcgattttttaattccttgtgaaacttttgtaatatgaagttgaaattttgttattggtaaactataaatgtgtgaagttggagtatacctttaccttcttatttggctttgtgatagtttaatttatatgtattttgagttctgacttgtatttctttgaattgattctagtttaagtaatcatggcctcctccgagaacgtcatcaccgagttcatgcgcttcaaggtgcgcatggagggcaccgtgaacggccacgagttcgagatcgagggcgagggcgagggccgcccctacgagggccacaacaccgtgaagctgaaggtgacgaagggcggccccctgcccttcgcctgggacatcctgtccccccagttccagtacggctccaaggtgtacgtgaagcaccccgccgacatccccgactacaagaagctgtccttccccgagggcttcaagtgggagcgcgtgatgaacttcgaggacggcggcgtggcgaccgtgacccaggactcctccctgcaggacggctgcttcatctacaaggtgaagttcatcggcgtgaacttcccctccgacggccccgtgatgcagaagaagaccatgggctgggaggcctccaccgagcgcctgtacccccgcgacggcgtgctgaagggcgagacccacaaggccctgaagctgaaggacggcggccactacctggtggagttcaagtccatctacatggccaagaagcccgtgcagctgcccggctactactacgtggacgccaagctggacatcacctcccacaacgaggactacaccatcgtggagcagtacgagcgcaccgagggccgccaccacctgttcctgtagttttgtgatctgatgataagtggttggttcgtgtctcatgcacttgggaggtgatctatttcacctggtgtagtttgtgtttccgtcagttggaaaaacttatccctatcgatttcgttttcattttctgcttttcttttatgtaccttcgtttgggcttgtaacgggcctttgtatttcaactctcaataataatccaagtgcatgttaaacaatttgtcatctgtttcggctttgatatactactggtgaagatgggccgtactactgcatcacaacgaaaaataataataagatgaaaaacttgaagtggaaaaaaaaaaaaacttgaatgttcactactactcattgaccataatgtttaacatacatagctcaatagtatttttgtgaatatggcaacacaaacagtccaaaacaattgtctcttactataccaaaccaagggcgccgcttgtttgccactctttgtgtgcaatagtgtgattaccacatctccacattcaatatattccctgaattatctgacgattttgatggctcactgttttcccaagtcttgaattgtcttctgtgcgccagtcaaatgcatatgtgttgagtttatcttttaaatatcaagcttttgtttttaacttttgtttgtaaccaaaaactcacagtaggagtttgatcacataattttatgtttgcctttgcaatttctagtgagtctttgattaaaagcttgaaaagaaaatgcagccaagcttaccaagtaagttatgtgtattaaccagaggaagagagaatcttgcaaaatttcaacaaacacaaaaagaagtattactacgattggtggagaaagaaaacgattccaaatcttgaactgttgttgtaaaagcatagcagaaagtgggagacaaccgaaatagaaatgactataacttaatttaatgttatcattataatttcttctagcaaatatttagaaagtaaatatcacatcaacctttaatgtaattaagctttctctttttgattcatgtgagatgaaaagaaaaaaaagaagagaaaagtgtagaaaacacatcatttctaagctgaagctgaggtacaaattaattaataagtgactagggtcacgtgaccctagtcacttatgattccgatgacttcgtaggttcctagctcaagccgctcgtgtccaagcgtcacttacgattagctaatgattacggcatctaggaccgactagttcttatgtgcttctagtctccaaatgtggttgatagttattttgctctaagatcaacagtaatgaagtataaatcatcgttgtggtgtgctactcggttaattgagcattaacacacacaaacatgacgaggatggtataatctccaaaaatgtgtactttgttaggtgggaccctatagccttgattaatgtgctatgttaggcatgcctggaaacgtgtgacgcatatgttttgtgaacctgttgatattatatgtgcttttatattaccatattttattaaaatactaatatttattactagtaagatataacattctatctagcttaaaaactaaccataaatattccataataactagatttaccaaactaatatactaaatatacataataaatacaaaattaacaagacaataatcaatatttatgagcttaatatatttagacattatggttggtcgacgataatcatgctaacttttcgtaattgcttgattgaaatatgcttagaataatgcctctttgttctacatggcaaatagggaccattatggtgtaacaccctgggaaccacaaacaccccgaaatgctactaaactacacaactaaccttcatatataaaatttcgacagcatctcctttgaaaatttgcatagacgtggaagcaacagagtataaacagatctagctagctaagtttaaacggccggccaaacgtgcaagcgctactagacaattcagtacattaaaaacgtccgcaatgtgttattaagttgtctaagcgtcaatttatttacaattgaatatatcctgcca

SEQ ID NO: 157 - DNA, 15458 bp, Artificial Sequence
  RV026531 T-DNA
aattacaacggtatatatcctgtcagccaacaccaaaacatcaaaaaaatcgggatcaggatcaggatctgcggccgcatcctgcaggtttaaacggccggccttcactagctagctgctaagctcaaacgagcaggaagcaacgagagggtggcgcgcgaccgacgtgcgtacgtagcatgagcctgagtggagacgttggacgtgtatgtatatacctctctgcgtgttaactatgtacgtaagcggcaggcagtgcaataagtgtggctctgtagtatgtacgtgcgggtacgatgctgtaagctactgaggcaagtccataaataaataatgacacgtgcgtgttctataatctcttcgcttcttcatttgtccccttgcggagtttggcatccattgatgccgttacgctgagaacagacacagcagacgaaccaaaagtgagttcttgtatgaaactatgacccttcatcgctaggctcaaacagcaccccgtacgaacacagcaaattagtcatctaactattagcccctacatgtttcagacgatacataaatatagcccatccttagcaattagctattggccctgcccatcccaagcaatgatctcgaagtatttttaatatatagtatttttaatatgtagcttttaaaattagaagataattttgagacaaaaatctccaagtatttttttgggtattttttactgcctccgtttttctttatttctcgtcacctagtttaattttgtgctaatcggctataaacgaaacagagagaaaagttactctaaaagcaactccaacagattagatataaatcttatatcctgcctagagctgttaaaaagatagacaactttagtggattagtgtatgcaacaaactctccaaatttaagtatcccaactacccaacgcatatcgttcccttttcattggcgcacgaactttcacctgctatagccgacgtacatgttcgttttttttgggcggcgcttactttcttccccgttcgttctcagcatcgcaactcaatttgttatggcggagaagcccttgtatcccaggtagtaatgcacagatatgcattattattattcataaaatcgagctagttaccctatgaggtgacatgaagcgctcacggttactatgacggttagcttcacgactgttggtggcagtagcgtacgacttagctatagttccggacttacctaactgactagagtcacacttagctgaccctagtcacttaggcgcgccaagcttggatctcctgcaggatctggccggccggatgggcggatctcgtacctcaactttgtatagaaaagttgggccagaatggcccggaccgggttaccaagcggccgcgaattccagaagaccaaagggcaattgagacttttcaacaaagggtaatatcgggaaacctcctcggattccattgcccagctatctgtcacttcatcaaaaggacagtagaaaaggaaggtggcacctacaaatgccatcattgcgataaaggaaaggctatcgttcaagatgcctctgccgacagtggtcccaaagatggacccccacccacgaggagcatcgtggaaaaagaagacgttccaaccacgtcttcaaagcaagtggattgatgtgatatctccactgacgtaagggatgacgcacaatcccactatccttcgcaagacccttcctctatataaggaagttcatttcatttggagaggacccatggaccctcaacagaacccaaatgaagtacaagaaggaggcaacaggcaggggggtggaatcatgtgcaggcaaagcagtacgcggtggacacccacaactgatcagataaaaatcttgaaggacctttactacaacaatggcattaggtcacccagcgctgagcagattcagaggatctctgctaagctgcgacagttcggcaagatcgaaggcaagaacgttttctattggtttcagaaccacaaagctcgtgagaggcagaagaaaagattcacttcttcttctgctcctgatcaccatcatcatgcagcaccaccagtgccagctgtaccaccagaatccaataatatcaggcaaagatcatcaggggttgggattgatattaatgcaactgctgctgctgcttatgaacaagcacccattaatcaccaccgcaagtattccaacatttctgctccaccagccgggttttcttctgcatcttcttcttcagttggtgtgaatgtttctgttggggcacagatgggaaactatgggtatggatccattgctatggagaagagctttagggagtgctcaatatcatctggaggaagtactagcactggtcatgtgggtggatctaattataatacttttaatcacaactatggatcatgggttggtgttgatccatattcctcgccctacactatctttgacaagaaatcctcatcaaaaccagtgtttggtgaccaggaaaatatgacggaagaagaatactacaatctgcaagcttcccaagagattgagactctcccactcttccccatgcacggtgaagacattcatggctttggcaacatcaagtcatcctctatggatggctactactccggctggtacaggtccgatggcggcaacgatggtggctctcgcacttcccttgagcttagcctcaattcctacggtcacatgacccatgattacttcagatcatattgaggtacctgacatcttatagtctgcaacctctcgtgtctgaattcctatctttatcaagtgttattgcttccacgactataggacagctttcgtcgaaaggttttgctcatgtgatctcgaaggattcatctagtctgatttttcgtgacttgtatcggttttattggattcatccaacatatatcaataaaaaatgagttgtgtttcctttcttcctagttcagttaaaattatttccctcctgcgcttgtgctgtaattgtctgtgtacctgttgtttgtgactgtgttagttcccttggatatgatttcgtatttgatatgtacatggagatagcttagcttcattattggagtatgaagttagtatgacatagtcactctcctggaaaattgacactgcaaaccatatttttattctgaaccacaaatcctagtcagtccgctggcatatgccgtccgtttgctgaatccagaacgtgggtttggagatgtacggctgagatgcctctatgcgaaggggatttcgtggtgaaacgagatgggagtagagcaacgcccgtggaagatgcttcaaacttccacacttttgagcaacgatcggcagtagtaaggtagacgatttcaagatcaaagcatatgaagataaacaacatcaacaacaaaatttgttggggttctatagagagaaacagagctacatacatacactgttttgtatctaccatctgagatgatgaaaagatgaaaaactaaagaatgccccggcgccaacgccaggacacgccgcgcgcgcgtcacccgagccatctcttgacccagccggcgctgtatatttacacacgttgcagcatcgatcaccacctgttcgatcgcgtcgccgtcaccaagcttggcgcgccggtcacccggtccgggcctagaaggccacccggggctcggcgttaggcttttagtccgctaggtggctagaccgaggttaggacgctagttcactaggggcctagtggtgttttaaggatgggcaagtttgtacaaaaaagcaggctggcgccggaaccaattcagtcgagtgcggccgccagtgtgatggatatctcgacccgggtgattgcggttacatcatgtacggaaaaataattctaatccttgatttaaatttgaacttgactatttatttattctttatttcattttgtaaatcattttatgtatctcctggcaagcaattttatccaccttgcaccaacaccttcgggttccataatcaaaccaccttaacttcacaccatgctgtaactcacaccgcccagcatctccaatgtgaaagaagctaaaatttaataaacaatcatacgaagcagtgacaaaataccagatggtattaatgcttcgataaaattaattggaaagtataaaatggtagaaaataataaattataattaatttaagtaagataaaaaataattaaaaactaaaatgttaaaattttaaaaaaattattttaaataatatttaaaaacattaaaaatcattttaaaaaatttatttatagaacaattaaataaatatttcagctaataaaaaacaaaagcttacctagccttagaagacaacttgtccaacaattagatgatacccattgcccttacgttttctttaacatcaattattgtttttgtcaacaagctatcttttagttttattttattggtaaaaaatatgtcgccttcaagttgcatcatttaacacatctcgtcattagaaaaataaaactcttccctaaacgattagtagaaaaaatcattcgataataaataagaaagaaaaattagaaaaaaataacttcattttaaaaaaatcattaaggctatattttttaaatgactaattttatatagactgtaactaaaagtatacaatttattatgctatgtatcttaaagaattacttataaaaatctacggaagaatatcttacaaagtgaaaaacaaatgagaaagaatttagtgggatgattatgattttatttgaaaattgaaaaaataattattaaagactttagtggagtaagaaagctttcctattagtcttttcttatccataaaaaaaaaaaaaaaaatctagcgtgacagcttttccatagattttaataatgtaaaatactggtagcagccgaccgttcaggtaatggacactgtggtcctaacttgcaacgggtgcgggcccaatttaataacgccgtggtaacggataaagccaagcgtgaagcggtgaaggtacatctctgactccgtcaagattacgaaaccgtcaactacgaaggactccccgaaatatcatctgtgtcataaacaccaagtcacaccatacatgggcacgcgtcacaatatgattggagaacggttccaccgcatatgctataaaatgcccccacacccctcgaccctaatcgcacttcaattgcaatcaaattagttcattctctttgcgcagttccctacctctcctttcaaggttcgtagatttcttccgtttttttttcttcttctttattgtttgttctacatcagcatgatgttgatttgattgtgttttctatcgtttcatcgattataaattttcataatcagaagattcagcttttattaatgcaagaacgtccttaattgatgattttataaccgtaaattaggtctaattagagtttttttcataaagattttcagatccgtttacaacaagccttaattgttgattctgtagtcgtagattaaggtttttttcatgaactacttcagatccgttaaacaacagccttatttgttgatacttcagtcgtttttcaagaaattgttcagatccgttgataaaagccttattcgttgattctgtatggtatttcaagagatattgctcaggtcctttagcaactaccttatttgttgattctgtggccatagattaggattttttttcacgaaattgcttcttgaaattacgtgatggattttgattctgatttatcttgtgattgttgactctacagccatggcccacagcaagcacggcctgaaggaggagatgaccatgaagtaccacatggagggctgcgtgaacggccacaagttcgtgatcaccggcgagggcatcggctaccccttcaagggcaagcagaccatcaacctgtgcgtgatcgagggcggccccctgcccttcagcgaggacatcctgagcgccggcttcaagtacggcgaccggatcttcaccgagtacccccaggacatcgtggactacttcaagaacagctgccccgccggctacacctggggccggagcttcctgttcgaggacggcgccgtgtgcatctgtaacgtggacatcaccgtgagcgtgaaggagaactgcatctaccacaagagcatcttcaacggcgtgaacttccccgccgacggccccgtgatgaagaagatgaccaccaactgggaggccagctgcgagaagatcatgcccgtgcctaagcagggcatcctgaagggcgacgtgagcatgtacctgctgctgaaggacggcggccggtaccggtgccagttcgacaccgtgtacaaggccaagagcgtgcccagcaagatgcccgagtggcacttcatccagcacaagctgctgcgggaggaccggagcgacgccaagaaccagaagtggcagctgaccgagcacgccatcgccttccccagcgccctggcctgagagctcgaatttccccgatcgttcaaacatttggcaataaagtttcttaagattgaatcctgttgccggtcttgcgatgattatcatataatttctgttgaattacgttaagcatgtaataattaacatgtaatgcatgacgttatttatgagatgggtttttatgattagagtcccgcaattatacatttaatacgcgatagaaaacaaaatatagcgcgcaaactaggataaattatcgcgcgcggtgtcatctatgttactagatcgggaattctagtggccggcccagctgatatctagacccagctttcttgtacaaagtggccgttaacggatcggccagaatggcccggaccgggttaccgaattcgagctcggtaccctgggatccgatatcgatgggccctggccgaagcttggtcacccggtccgggcctagaaggccagcttcggccgccccgggcaactttattatacaaagttgatggtacggatccgtcgacggcgcgccgcggacctgaattccagcacactggcggccgttagtctaaaaacggcccctaactaacgcttagttgcccgctagattagtcccccgttagtgcctagttagacacacgacgaactaggggctactagtaacggccgccagtgtgctcggtacggccagaatggccatctggattcagcagggggtgattgcggttacatcatgtacggaaaaataattctaatccttgatttaaatttgaacttgactatttatttattctttatttcattttgtaaatcattttatgtatctcctggcaagcaattttatccaccttgcaccaacaccttcgggttccataatcaaaccaccttaacttcacaccatgctgtaactcacaccgcccagcatctccaatgtgaaagaagctaaaatttaataaacaatcatacgaagcagtgacaaaataccagatggtattaatgcttcgataaaattaattggaaagtataaaatggtagaaaataataaattataattaatttaagtaagataaaaaataattaaaaactaaaatgttaaaattttaaaaaaattattttaaataatatttaaaaacattaaaaatcattttaaaaaatttatttatagaacaattaaataaatatttcagctaataaaaaacaaaagcttacctagccttagaagacaacttgtccaacaattagatgatacccattgcccttacgttttctttaacatcaattattgtttttgtcaacaagctatcttttagttttattttattggtaaaaaatatgtcgccttcaagttgcatcatttaacacatctcgtcattagaaaaataaaactcttccctaaacgattagtagaaaaaatcattcgataataaataagaaagaaaaattagaaaaaaataacttcattttaaaaaaatcattaaggctatattttttaaatgactaattttatatagactgtaactaaaagtatacaatttattatgctatgtatcttaaagaattacttataaaaatctacggaagaatatcttacaaagtgaaaaacaaatgagaaagaatttagtgggatgattatgattttatttgaaaattgaaaaaataattattaaagactttagtggagtaagaaagctttcctattagtcttttcttatccataaaaaaaaaaaaaaaaatctagcgtgacagcttttccatagattttaataatgtaaaatactggtagcagccgaccgttcaggtaatggacactgtggtcctaacttgcaacgggtgcgggcccaatttaataacgccgtggtaacggataaagccaagcgtgaagcggtgaaggtacatctctgactccgtcaagattacgaaaccgtcaactacgaaggactccccgaaatatcatctgtgtcataaacaccaagtcacaccatacatgggcacgcgtcacaatatgattggagaacggttccaccgcatatgctataaaatgcccccacacccctcgaccctaatcgcacttcaattgcaatcaaattagttcattctctttgcgcagttccctacctctcctttcaaggttcgtagatttcttccgtttttttttcttcttctttattgtttgttctacatcagcatgatgttgatttgattgtgttttctatcgtttcatcgattataaattttcataatcagaagattcagcttttattaatgcaagaacgtccttaattgatgattttataaccgtaaattaggtctaattagagtttttttcataaagattttcagatccgtttacaacaagccttaattgttgattctgtagtcgtagattaaggtttttttcatgaactacttcagatccgttaaacaacagccttatttgttgatacttcagtcgtttttcaagaaattgttcagatccgttgataaaagccttattcgttgattctgtatggtatttcaagagatattgctcaggtcctttagcaactaccttatttgttgattctgtggccatagattaggattttttttcacgaaattgcttcttgaaattacgtgatggattttgattctgatttatcttgtgattgttgactctacagccatggctgcaactactcttacatctgctttacctggtgctttcagttcatcccagagaccaagtgctcctttcaacttacaaagatcacctagagtgcttagaaggttcaacagaaagacaggacgtcaacctcgtggacttgttcgtgctgcaaaggctcaagcggcgcaaaacctgccagagaaattcgatgaaacaagactctgggaggccctcaggggatttggggttagtccaagtagggttacttacgctcccgtcggattcggagattaccactggaccgtcacagatgaagacgggagaccttggttcgcaactgtcagtgacctcgaacacaaagagcattgcgggcagggagcacaagcagcccttaaaggactcagacaagctatggacactgccctcgcacttagagatagggacggactcagattcgtggttgctccagtggcagcaacagatgggggtggccctgtccttccccttgacgctaggtatgcactcacagtcttccctcacgtcccaggaagaacaggagagttcggacaaagactcacagaggcagagagggacagactgcttgctcttctggcagaactccacggaagaacacctcctgaaacaaccccaccagccgatatggaaccaccaggacttcctggtgttagagcagcactcgccgaaagtgaaggaccttggagtggaggaccatttgcagaacccgctagacttcttctcagagaacacgaggccacactgcacgcaagactcgctgaattcgaagccctcgtcgcaagagttaagggtcgtggagcacctcttgtcgttacccacggagaaccacacccaggcaacttgatcctcggagaggaaggctatctcctcgtggactgggatacagttggactggctccagctgaaagggatttgagtctcatctcagacgacccagctgacctcgcaagatacgcagagcttacaggaagaactccagacccagacgcactcgcactctatagactgcgttggagtctccttgatgtggctgagttcgtcgagtggttcagggctgaacaccaaagaacccaagacaccgagagtgcatggaaggggttcactgacacacttgggcaattggctgctggtggatcagctgcatagcaaacttatctctgttatgaatcagaagaagttcatgtctcgtttcatttaaaactttggtggtttgtgttttggggccttgtaaagcccctgatgaataattgttcaactatgtttccgttcctgtgttatacctttctttctaatgagtaatgacatcaaacttcttctgtattgaaattatgtccttgtgagtctctttatcatcgtttcgtctttacattatatgtgctacttttgtctaatgagcctgaaaagtggctccaatggtacgcactggaagatttgttggcttctggtagatatagcgacagtgttgagcttgtaatatcatgtctcttattgctaaattagttcctttcttaacagaaaccttcaaagtttttgtttttgttttcatttacctaatgtacacatacgctggccatgactaacaacatgtccaggcttagagcatatttttttctagcttaaattgttaacttgtcattcagtaaaatccgagaattgtgaagctctaattgaagctaattcgttttataaagtcagttaaaaagtatactaaattatccaacttttcttcaaaatctcaaaattctatgacaaaacgatagtctttgtttatgtcagtaccacaaagaggtggaaaaaaacaccaaaaaaacaataagcaaactatacactgagaagaaaaataaaagagagctcaatagatgttttatactaacggtagattagatcaaagatccaagctttactctacatagagcagaacccagaatcccttcatatctcttttattctagcaccgataatctactgaaaagaagacacttagagctctgtctctttgtcaaagaagtcccagccgtcatccagaagctccttacgttcattaacagaggccgcaattggatcgggtttacttattttgtgggtatctatacttttattagatttttaatcaggctcctgatttctttttatttcgattgaattcctgaacttgtattattcagtagatcgaataaattataaaaagataaaatcataaaataatattttatcctatcaatcatattaaagcaatgaatatgtaaaattaatcttatctttattttaaaaaatcatataggtttagtatttttttaaaaataaagataggattagttttactattcactgcttattacttttaaaaaaatcataaaggtttagtatttttttaaaataaatataggaatagttttactattcactgctttaatagaaaaatagtttaaaatttaagatagttttaatcccagcatttgccacgtttgaacgtgagccgaaacgatgtcgttacattatcttaacctagctgaaacgatgtcgtcataatatcgccaaatgccaactggactacgtcgaacccacaaatcccacaaagcgcgtgaaatcaaatcgctcaaaccacaaaaaagaacaacgcgtttgttacacgctcaatcccacgcgagtagagcacagtaaccttcaaataagcgaatggggcataatcagaaatccgaaataaacctaggggcattatcggaaatgaaaagtagctcactcaatataaaaatctaggaaccctagttttcgttatcactctgtgctccctcgctctatttctcagtctctgtgtttgcggctgaggattccgaacgagtgaccttcttcgtttctcgcaaaggtaacagcctctgctcttgtctcttcgattcgatctatgcctgtctcttatttacgatgatgtttcttcggttatgtttttttatttatgctttatgctgttgatgttcggttgtttgtttcgctttgtttttgtggttcagttttttaggattcttttggtttttgaatcgattaatcggaagagattttcgagttatttggtgtgttggaggtgaatcttttttttgaggtcatagatctgttgtatttgtgttataaacatgcgactttgtatgattttttacgaggttatgatgttctggttgttttattatgaatctgttgagacagaaccatgatttttgttgatgttcgtttacactattaaaggtttgttttaacaggattaaaagttttttaagcatgttgaaggagtcttgtagatatgtaaccgtcgatagtttttttgtgggtttgttcacatgttatcaagcttaatcttttactatgtatgcgaccatatctggatccagcaaaggcgattttttaattccttgtgaaacttttgtaatatgaagttgaaattttgttattggtaaactataaatgtgtgaagttggagtatacctttaccttcttatttggctttgtgatagtttaatttatatgtattttgagttctgacttgtatttctttgaattgattctagtttaagtaatcatggcctcctccgagaacgtcatcaccgagttcatgcgcttcaaggtgcgcatggagggcaccgtgaacggccacgagttcgagatcgagggcgagggcgagggccgcccctacgagggccacaacaccgtgaagctgaaggtgacgaagggcggccccctgcccttcgcctgggacatcctgtccccccagttccagtacggctccaaggtgtacgtgaagcaccccgccgacatccccgactacaagaagctgtccttccccgagggcttcaagtgggagcgcgtgatgaacttcgaggacggcggcgtggcgaccgtgacccaggactcctccctgcaggacggctgcttcatctacaaggtgaagttcatcggcgtgaacttcccctccgacggccccgtgatgcagaagaagaccatgggctgggaggcctccaccgagcgcctgtacccccgcgacggcgtgctgaagggcgagacccacaaggccctgaagctgaaggacggcggccactacctggtggagttcaagtccatctacatggccaagaagcccgtgcagctgcccggctactactacgtggacgccaagctggacatcacctcccacaacgaggactacaccatcgtggagcagtacgagcgcaccgagggccgccaccacctgttcctgtagttttgtgatctgatgataagtggttggttcgtgtctcatgcacttgggaggtgatctatttcacctggtgtagtttgtgtttccgtcagttggaaaaacttatccctatcgatttcgttttcattttctgcttttcttttatgtaccttcgtttgggcttgtaacgggcctttgtatttcaactctcaataataatccaagtgcatgttaaacaatttgtcatctgtttcggctttgatatactactggtgaagatgggccgtactactgcatcacaacgaaaaataataataagatgaaaaacttgaagtggaaaaaaaaaaaaacttgaatgttcactactactcattgaccataatgtttaacatacatagctcaatagtatttttgtgaatatggcaacacaaacagtccaaaacaattgtctcttactataccaaaccaagggcgccgcttgtttgccactctttgtgtgcaatagtgtgattaccacatctccacattcaatatattccctgaattatctgacgattttgatggctcactgttttcccaagtcttgaattgtcttctgtgcgccagtcaaatgcatatgtgttgagtttatcttttaaatatcaagcttttgtttttaacttttgtttgtaaccaaaaactcacagtaggagtttgatcacataattttatgtttgcctttgcaatttctagtgagtctttgattaaaagcttgaaaagaaaatgcagccaagcttaccaagtaagttatgtgtattaaccagaggaagagagaatcttgcaaaatttcaacaaacacaaaaagaagtattactacgattggtggagaaagaaaacgattccaaatcttgaactgttgttgtaaaagcatagcagaaagtgggagacaaccgaaatagaaatgactataacttaatttaatgttatcattataatttcttctagcaaatatttagaaagtaaatatcacatcaacctttaatgtaattaagctttctctttttgattcatgtgagatgaaaagaaaaaaaagaagagaaaagtgtagaaaacacatcatttctaagctgaagctgaggtacaaattaattaataagtgactagggtcacgtgaccctagtcacttatgattccgatgacttcgtaggttcctagctcaagccgctcgtgtccaagcgtcacttacgattagctaatgattacggcatctaggaccgactagttcttatgtgcttctagtctccaaatgtggttgatagttattttgctctaagatcaacagtaatgaagtataaatcatcgttgtggtgtgctactcggttaattgagcattaacacacacaaacatgacgaggatggtataatctccaaaaatgtgtactttgttaggtgggaccctatagccttgattaatgtgctatgttaggcatgcctggaaacgtgtgacgcatatgttttgtgaacctgttgatattatatgtgcttttatattaccatattttattaaaatactaatatttattactagtaagatataacattctatctagcttaaaaactaaccataaatattccataataactagatttaccaaactaatatactaaatatacataataaatacaaaattaacaagacaataatcaatatttatgagcttaatatatttagacattatggttggtcgacgataatcatgctaacttttcgtaattgcttgattgaaatatgcttagaataatgcctctttgttctacatggcaaatagggaccattatggtgtaacaccctgggaaccacaaacaccccgaaatgctactaaactacacaactaaccttcatatataaaatttcgacagcatctcctttgaaaatttgcatagacgtggaagcaacagagtataaacagatctagctagctaagtttaaacggccggccaaacgtgcaagcgctactagacaattcagtacattaaaaacgtccgcaatgtgttattaagttgtctaagcgtcaatttatttacaattgaatatatcctgcca

SEQ ID NO: 158 - DNA, 15376 bp, Artificial Sequence
  RV026524 T-DNA
caaacaaacatacacagcgatttattcacacgaacccgaattacaacggtatatatcctgtcagccaacaccaaaacatcaaaaaaatcgggatcaggatcaggatctgcggccgcatcctgcaggtttaaacggccggccttcactagctagctgctaagctcaaacgagcaggaagcaacgagagggtggcgcgcgaccgacgtgcgtacgtagcatgagcctgagtggagacgttggacgtgtatgtatatacctctctgcgtgttaactatgtacgtaagcggcaggcagtgcaataagtgtggctctgtagtatgtacgtgcgggtacgatgctgtaagctactgaggcaagtccataaataaataatgacacgtgcgtgttctataatctcttcgcttcttcatttgtccccttgcggagtttggcatccattgatgccgttacgctgagaacagacacagcagacgaaccaaaagtgagttcttgtatgaaactatgacccttcatcgctaggctcaaacagcaccccgtacgaacacagcaaattagtcatctaactattagcccctacatgtttcagacgatacataaatatagcccatccttagcaattagctattggccctgcccatcccaagcaatgatctcgaagtatttttaatatatagtatttttaatatgtagcttttaaaattagaagataattttgagacaaaaatctccaagtatttttttgggtattttttactgcctccgtttttctttatttctcgtcacctagtttaattttgtgctaatcggctataaacgaaacagagagaaaagttactctaaaagcaactccaacagattagatataaatcttatatcctgcctagagctgttaaaaagatagacaactttagtggattagtgtatgcaacaaactctccaaatttaagtatcccaactacccaacgcatatcgttcccttttcattggcgcacgaactttcacctgctatagccgacgtacatgttcgttttttttgggcggcgcttactttcttccccgttcgttctcagcatcgcaactcaatttgttatggcggagaagcccttgtatcccaggtagtaatgcacagatatgcattattattattcataaaatcgagctagttaccctatgaggtgacatgaagcgctcacggttactatgacggttagcttcacgactgttggtggcagtagcgtacgacttagctatagttccggacttacctaactgactagagtcacacttagctgaccctagtcacttaggcgcgccaagcttggatctcctgcaggatctggccggccggatgggcggatctcgtacctcaactttgtatagaaaagttgggccagaatggcccggaccgggttaccaagcggccgcgaattccagaagaccaaagggcaattgagacttttcaacaaagggtaatatcgggaaacctcctcggattccattgcccagctatctgtcacttcatcaaaaggacagtagaaaaggaaggtggcacctacaaatgccatcattgcgataaaggaaaggctatcgttcaagatgcctctgccgacagtggtcccaaagatggacccccacccacgaggagcatcgtggaaaaagaagacgttccaaccacgtcttcaaagcaagtggattgatgtgatatctccactgacgtaagggatgacgcacaatcccactatccttcgcaagacccttcctctatataaggaagttcatttcatttggagaggacccatggaacctcaacaacaacagcagcagcagcaaaaccaacaacaaccaaacgatgacaatagcagcggtgccaaaggaaactttctttgcaggcaaagcagtactaggtggactcccacaactgaccaaataagaatattgaaggacctttactacaacagtggagttaggtccccaagtgcagagcagattcagaggatatctgctaggcttagacagtacggtaagattgaaggcaagaatgtcttttattggtttcagaaccataaagctcgtgagaggcagaagaaaaggttcaccactgatgtccccatgcaacaaagaactgtttcgaatgcttctagttggaagcctgaagactattccttccacaacaaataccccaacattgctcctgggttttcttctgcatctccatcctcagctgctgggcttcctgttggacagatgggaaactatgggtatggatctgtaactatggagaagagttttagggactgctcaatatcagctactgccaacggtggtgttggtggatccatgagccccaactgtgggtgggttggcattgatccctactgttcatcctactctctctttgacaagcaaaaatcaactaatgaaaccctagaagatgaagaacaagatcaagatcaagaagaggaagcaactccagggattgaaaccctccctctcttccctacccagagagaagacatcaatggcttctgcaacatgaagcaccaccccatctgctactccgaaaactactgctatggctctgacgatggaaacaacgcttcgcgtacttccctcgaacttagcctcaactcttacagcaatgggcaggcacgggattccatctaaggtacctgacatcttatagtctgcaacctctcgtgtctgaattcctatctttatcaagtgttattgcttccacgactataggacagctttcgtcgaaaggttttgctcatgtgatctcgaaggattcatctagtctgatttttcgtgacttgtatcggttttattggattcatccaacatatatcaataaaaaatgagttgtgtttcctttcttcctagttcagttaaaattatttccctcctgcgcttgtgctgtaattgtctgtgtacctgttgtttgtgactgtgttagttcccttggatatgatttcgtatttgatatgtacatggagatagcttagcttcattattggagtatgaagttagtatgacatagtcactctcctggaaaattgacactgcaaaccatatttttattctgaaccacaaatcctagtcagtccgctggcatatgccgtccgtttgctgaatccagaacgtgggtttggagatgtacggctgagatgcctctatgcgaaggggatttcgtggtgaaacgagatgggagtagagcaacgcccgtggaagatgcttcaaacttccacacttttgagcaacgatcggcagtagtaaggtagacgatttcaagatcaaagcatatgaagataaacaacatcaacaacaaaatttgttggggttctatagagagaaacagagctacatacatacactgttttgtatctaccatctgagatgatgaaaagatgaaaaactaaagaatgccccggcgccaacgccaggacacgccgcgcgcgcgtcacccgagccatctcttgacccagccggcgctgtatatttacacacgttgcagcatcgatcaccacctgttcgatcgcgtcgccgtcaccaagcttggcgcgccggtcacccggtccgggcctagaaggccacccggggctcggcgttaggcttttagtccgctaggtggctagaccgaggttaggacgctagttcactaggggcctagtggtgttttaaggatgggcaagtttgtacaaaaaagcaggctggcgccggaaccaattcagtcgagtgcggccgccagtgtgatggatatctcgacccgggtgattgcggttacatcatgtacggaaaaataattctaatccttgatttaaatttgaacttgactatttatttattctttatttcattttgtaaatcattttatgtatctcctggcaagcaattttatccaccttgcaccaacaccttcgggttccataatcaaaccaccttaacttcacaccatgctgtaactcacaccgcccagcatctccaatgtgaaagaagctaaaatttaataaacaatcatacgaagcagtgacaaaataccagatggtattaatgcttcgataaaattaattggaaagtataaaatggtagaaaataataaattataattaatttaagtaagataaaaaataattaaaaactaaaatgttaaaattttaaaaaaattattttaaataatatttaaaaacattaaaaatcattttaaaaaatttatttatagaacaattaaataaatatttcagctaataaaaaacaaaagcttacctagccttagaagacaacttgtccaacaattagatgatacccattgcccttacgttttctttaacatcaattattgtttttgtcaacaagctatcttttagttttattttattggtaaaaaatatgtcgccttcaagttgcatcatttaacacatctcgtcattagaaaaataaaactcttccctaaacgattagtagaaaaaatcattcgataataaataagaaagaaaaattagaaaaaaataacttcattttaaaaaaatcattaaggctatattttttaaatgactaattttatatagactgtaactaaaagtatacaatttattatgctatgtatcttaaagaattacttataaaaatctacggaagaatatcttacaaagtgaaaaacaaatgagaaagaatttagtgggatgattatgattttatttgaaaattgaaaaaataattattaaagactttagtggagtaagaaagctttcctattagtcttttcttatccataaaaaaaaaaaaaaaaatctagcgtgacagcttttccatagattttaataatgtaaaatactggtagcagccgaccgttcaggtaatggacactgtggtcctaacttgcaacgggtgcgggcccaatttaataacgccgtggtaacggataaagccaagcgtgaagcggtgaaggtacatctctgactccgtcaagattacgaaaccgtcaactacgaaggactccccgaaatatcatctgtgtcataaacaccaagtcacaccatacatgggcacgcgtcacaatatgattggagaacggttccaccgcatatgctataaaatgcccccacacccctcgaccctaatcgcacttcaattgcaatcaaattagttcattctctttgcgcagttccctacctctcctttcaaggttcgtagatttcttccgtttttttttcttcttctttattgtttgttctacatcagcatgatgttgatttgattgtgttttctatcgtttcatcgattataaattttcataatcagaagattcagcttttattaatgcaagaacgtccttaattgatgattttataaccgtaaattaggtctaattagagtttttttcataaagattttcagatccgtttacaacaagccttaattgttgattctgtagtcgtagattaaggtttttttcatgaactacttcagatccgttaaacaacagccttatttgttgatacttcagtcgtttttcaagaaattgttcagatccgttgataaaagccttattcgttgattctgtatggtatttcaagagatattgctcaggtcctttagcaactaccttatttgttgattctgtggccatagattaggattttttttcacgaaattgcttcttgaaattacgtgatggattttgattctgatttatcttgtgattgttgactctacagccatggcccacagcaagcacggcctgaaggaggagatgaccatgaagtaccacatggagggctgcgtgaacggccacaagttcgtgatcaccggcgagggcatcggctaccccttcaagggcaagcagaccatcaacctgtgcgtgatcgagggcggccccctgcccttcagcgaggacatcctgagcgccggcttcaagtacggcgaccggatcttcaccgagtacccccaggacatcgtggactacttcaagaacagctgccccgccggctacacctggggccggagcttcctgttcgaggacggcgccgtgtgcatctgtaacgtggacatcaccgtgagcgtgaaggagaactgcatctaccacaagagcatcttcaacggcgtgaacttccccgccgacggccccgtgatgaagaagatgaccaccaactgggaggccagctgcgagaagatcatgcccgtgcctaagcagggcatcctgaagggcgacgtgagcatgtacctgctgctgaaggacggcggccggtaccggtgccagttcgacaccgtgtacaaggccaagagcgtgcccagcaagatgcccgagtggcacttcatccagcacaagctgctgcgggaggaccggagcgacgccaagaaccagaagtggcagctgaccgagcacgccatcgccttccccagcgccctggcctgagagctcgaatttccccgatcgttcaaacatttggcaataaagtttcttaagattgaatcctgttgccggtcttgcgatgattatcatataatttctgttgaattacgttaagcatgtaataattaacatgtaatgcatgacgttatttatgagatgggtttttatgattagagtcccgcaattatacatttaatacgcgatagaaaacaaaatatagcgcgcaaactaggataaattatcgcgcgcggtgtcatctatgttactagatcgggaattctagtggccggcccagctgatatctagacccagctttcttgtacaaagtggccgttaacggatcggccagaatggcccggaccgggttaccgaattcgagctcggtaccctgggatccgatatcgatgggccctggccgaagcttggtcacccggtccgggcctagaaggccagcttcggccgccccgggcaactttattatacaaagttgatggtacggatccgtcgacggcgcgccgcggacctgaattccagcacactggcggccgttagtctaaaaacggcccctaactaacgcttagttgcccgctagattagtcccccgttagtgcctagttagacacacgacgaactaggggctactagtaacggccgccagtgtgctcggtacggccagaatggccatctggattcagcagggggtgattgcggttacatcatgtacggaaaaataattctaatccttgatttaaatttgaacttgactatttatttattctttatttcattttgtaaatcattttatgtatctcctggcaagcaattttatccaccttgcaccaacaccttcgggttccataatcaaaccaccttaacttcacaccatgctgtaactcacaccgcccagcatctccaatgtgaaagaagctaaaatttaataaacaatcatacgaagcagtgacaaaataccagatggtattaatgcttcgataaaattaattggaaagtataaaatggtagaaaataataaattataattaatttaagtaagataaaaaataattaaaaactaaaatgttaaaattttaaaaaaattattttaaataatatttaaaaacattaaaaatcattttaaaaaatttatttatagaacaattaaataaatatttcagctaataaaaaacaaaagcttacctagccttagaagacaacttgtccaacaattagatgatacccattgcccttacgttttctttaacatcaattattgtttttgtcaacaagctatcttttagttttattttattggtaaaaaatatgtcgccttcaagttgcatcatttaacacatctcgtcattagaaaaataaaactcttccctaaacgattagtagaaaaaatcattcgataataaataagaaagaaaaattagaaaaaaataacttcattttaaaaaaatcattaaggctatattttttaaatgactaattttatatagactgtaactaaaagtatacaatttattatgctatgtatcttaaagaattacttataaaaatctacggaagaatatcttacaaagtgaaaaacaaatgagaaagaatttagtgggatgattatgattttatttgaaaattgaaaaaataattattaaagactttagtggagtaagaaagctttcctattagtcttttcttatccataaaaaaaaaaaaaaaaatctagcgtgacagcttttccatagattttaataatgtaaaatactggtagcagccgaccgttcaggtaatggacactgtggtcctaacttgcaacgggtgcgggcccaatttaataacgccgtggtaacggataaagccaagcgtgaagcggtgaaggtacatctctgactccgtcaagattacgaaaccgtcaactacgaaggactccccgaaatatcatctgtgtcataaacaccaagtcacaccatacatgggcacgcgtcacaatatgattggagaacggttccaccgcatatgctataaaatgcccccacacccctcgaccctaatcgcacttcaattgcaatcaaattagttcattctctttgcgcagttccctacctctcctttcaaggttcgtagatttcttccgtttttttttcttcttctttattgtttgttctacatcagcatgatgttgatttgattgtgttttctatcgtttcatcgattataaattttcataatcagaagattcagcttttattaatgcaagaacgtccttaattgatgattttataaccgtaaattaggtctaattagagtttttttcataaagattttcagatccgtttacaacaagccttaattgttgattctgtagtcgtagattaaggtttttttcatgaactacttcagatccgttaaacaacagccttatttgttgatacttcagtcgtttttcaagaaattgttcagatccgttgataaaagccttattcgttgattctgtatggtatttcaagagatattgctcaggtcctttagcaactaccttatttgttgattctgtggccatagattaggattttttttcacgaaattgcttcttgaaattacgtgatggattttgattctgatttatcttgtgattgttgactctacagccatggctgcaactactcttacatctgctttacctggtgctttcagttcatcccagagaccaagtgctcctttcaacttacaaagatcacctagagtgcttagaaggttcaacagaaagacaggacgtcaacctcgtggacttgttcgtgctgcaaaggctcaagcggcgcaaaacctgccagagaaattcgatgaaacaagactctgggaggccctcaggggatttggggttagtccaagtagggttacttacgctcccgtcggattcggagattaccactggaccgtcacagatgaagacgggagaccttggttcgcaactgtcagtgacctcgaacacaaagagcattgcgggcagggagcacaagcagcccttaaaggactcagacaagctatggacactgccctcgcacttagagatagggacggactcagattcgtggttgctccagtggcagcaacagatgggggtggccctgtccttccccttgacgctaggtatgcactcacagtcttccctcacgtcccaggaagaacaggagagttcggacaaagactcacagaggcagagagggacagactgcttgctcttctggcagaactccacggaagaacacctcctgaaacaaccccaccagccgatatggaaccaccaggacttcctggtgttagagcagcactcgccgaaagtgaaggaccttggagtggaggaccatttgcagaacccgctagacttcttctcagagaacacgaggccacactgcacgcaagactcgctgaattcgaagccctcgtcgcaagagttaagggtcgtggagcacctcttgtcgttacccacggagaaccacacccaggcaacttgatcctcggagaggaaggctatctcctcgtggactgggatacagttggactggctccagctgaaagggatttgagtctcatctcagacgacccagctgacctcgcaagatacgcagagcttacaggaagaactccagacccagacgcactcgcactctatagactgcgttggagtctccttgatgtggctgagttcgtcgagtggttcagggctgaacaccaaagaacccaagacaccgagagtgcatggaaggggttcactgacacacttgggcaattggctgctggtggatcagctgcatagcaaacttatctctgttatgaatcagaagaagttcatgtctcgtttcatttaaaactttggtggtttgtgttttggggccttgtaaagcccctgatgaataattgttcaactatgtttccgttcctgtgttatacctttctttctaatgagtaatgacatcaaacttcttctgtattgaaattatgtccttgtgagtctctttatcatcgtttcgtctttacattatatgtgctacttttgtctaatgagcctgaaaagtggctccaatggtacgcactggaagatttgttggcttctggtagatatagcgacagtgttgagcttgtaatatcatgtctcttattgctaaattagttcctttcttaacagaaaccttcaaagtttttgtttttgttttcatttacctaatgtacacatacgctggccatgactaacaacatgtccaggcttagagcatatttttttctagcttaaattgttaacttgtcattcagtaaaatccgagaattgtgaagctctaattgaagctaattcgttttataaagtcagttaaaaagtatactaaattatccaacttttcttcaaaatctcaaaattctatgacaaaacgatagtctttgtttatgtcagtaccacaaagaggtggaaaaaaacaccaaaaaaacaataagcaaactatacactgagaagaaaaataaaagagagctcaatagatgttttatactaacggtagattagatcaaagatccaagctttactctacatagagcagaacccagaatcccttcatatctcttttattctagcaccgataatctactgaaaagaagacacttagagctctgtctctttgtcaaagaagtcccagccgtcatccagaagctccttacgttcattaacagaggccgcaattggatcgggtttacttattttgtgggtatctatacttttattagatttttaatcaggctcctgatttctttttatttcgattgaattcctgaacttgtattattcagtagatcgaataaattataaaaagataaaatcataaaataatattttatcctatcaatcatattaaagcaatgaatatgtaaaattaatcttatctttattttaaaaaatcatataggtttagtatttttttaaaaataaagataggattagttttactattcactgcttattacttttaaaaaaatcataaaggtttagtatttttttaaaataaatataggaatagttttactattcactgctttaatagaaaaatagtttaaaatttaagatagttttaatcccagcatttgccacgtttgaacgtgagccgaaacgatgtcgttacattatcttaacctagctgaaacgatgtcgtcataatatcgccaaatgccaactggactacgtcgaacccacaaatcccacaaagcgcgtgaaatcaaatcgctcaaaccacaaaaaagaacaacgcgtttgttacacgctcaatcccacgcgagtagagcacagtaaccttcaaataagcgaatggggcataatcagaaatccgaaataaacctaggggcattatcggaaatgaaaagtagctcactcaatataaaaatctaggaaccctagttttcgttatcactctgtgctccctcgctctatttctcagtctctgtgtttgcggctgaggattccgaacgagtgaccttcttcgtttctcgcaaaggtaacagcctctgctcttgtctcttcgattcgatctatgcctgtctcttatttacgatgatgtttcttcggttatgtttttttatttatgctttatgctgttgatgttcggttgtttgtttcgctttgtttttgtggttcagttttttaggattcttttggtttttgaatcgattaatcggaagagattttcgagttatttggtgtgttggaggtgaatcttttttttgaggtcatagatctgttgtatttgtgttataaacatgcgactttgtatgattttttacgaggttatgatgttctggttgttttattatgaatctgttgagacagaaccatgatttttgttgatgttcgtttacactattaaaggtttgttttaacaggattaaaagttttttaagcatgttgaaggagtcttgtagatatgtaaccgtcgatagtttttttgtgggtttgttcacatgttatcaagcttaatcttttactatgtatgcgaccatatctggatccagcaaaggcgattttttaattccttgtgaaacttttgtaatatgaagttgaaattttgttattggtaaactataaatgtgtgaagttggagtatacctttaccttcttatttggctttgtgatagtttaatttatatgtattttgagttctgacttgtatttctttgaattgattctagtttaagtaatcatggcctcctccgagaacgtcatcaccgagttcatgcgcttcaaggtgcgcatggagggcaccgtgaacggccacgagttcgagatcgagggcgagggcgagggccgcccctacgagggccacaacaccgtgaagctgaaggtgacgaagggcggccccctgcccttcgcctgggacatcctgtccccccagttccagtacggctccaaggtgtacgtgaagcaccccgccgacatccccgactacaagaagctgtccttccccgagggcttcaagtgggagcgcgtgatgaacttcgaggacggcggcgtggcgaccgtgacccaggactcctccctgcaggacggctgcttcatctacaaggtgaagttcatcggcgtgaacttcccctccgacggccccgtgatgcagaagaagaccatgggctgggaggcctccaccgagcgcctgtacccccgcgacggcgtgctgaagggcgagacccacaaggccctgaagctgaaggacggcggccactacctggtggagttcaagtccatctacatggccaagaagcccgtgcagctgcccggctactactacgtggacgccaagctggacatcacctcccacaacgaggactacaccatcgtggagcagtacgagcgcaccgagggccgccaccacctgttcctgtagttttgtgatctgatgataagtggttggttcgtgtctcatgcacttgggaggtgatctatttcacctggtgtagtttgtgtttccgtcagttggaaaaacttatccctatcgatttcgttttcattttctgcttttcttttatgtaccttcgtttgggcttgtaacgggcctttgtatttcaactctcaataataatccaagtgcatgttaaacaatttgtcatctgtttcggctttgatatactactggtgaagatgggccgtactactgcatcacaacgaaaaataataataagatgaaaaacttgaagtggaaaaaaaaaaaaacttgaatgttcactactactcattgaccataatgtttaacatacatagctcaatagtatttttgtgaatatggcaacacaaacagtccaaaacaattgtctcttactataccaaaccaagggcgccgcttgtttgccactctttgtgtgcaatagtgtgattaccacatctccacattcaatatattccctgaattatctgacgattttgatggctcactgttttcccaagtcttgaattgtcttctgtgcgccagtcaaatgcatatgtgttgagtttatcttttaaatatcaagcttttgtttttaacttttgtttgtaaccaaaaactcacagtaggagtttgatcacataattttatgtttgcctttgcaatttctagtgagtctttgattaaaagcttgaaaagaaaatgcagccaagcttaccaagtaagttatgtgtattaaccagaggaagagagaatcttgcaaaatttcaacaaacacaaaaagaagtattactacgattggtggagaaagaaaacgattccaaatcttgaactgttgttgtaaaagcatagcagaaagtgggagacaaccgaaatagaaatgactataacttaatttaatgttatcattataatttcttctagcaaatatttagaaagtaaatatcacatcaacctttaatgtaattaagctttctctttttgattcatgtgagatgaaaagaaaaaaaagaagagaaaagtgtagaaaacacatcatttctaagctgaagctgaggtacaaattaattaataagtgactagggtcacgtgaccctagtcacttatgattccgatgacttcgtaggttcctagctcaagccgctcgtgtccaagcgtcacttacgattagctaatgattacggcatctaggaccgactagttcttatgtgcttctagtctccaaatgtggttgatagttattttgctctaagatcaacagtaatgaagtataaatcatcgttgtggtgtgctactcggttaattgagcattaacacacacaaacatgacgaggatggtataatctccaaaaatgtgtactttgttaggtgggaccctatagccttgattaatgtgctatgttaggcatgcctggaaacgtgtgacgcatatgttttgtgaacctgttgatattatatgtgcttttatattaccatattttattaaaatactaatatttattactagtaagatataacattctatctagcttaaaaactaaccataaatattccataataactagatttaccaaactaatatactaaatatacataataaatacaaaattaacaagacaataatcaatatttatgagcttaatatatttagacattatggttggtcgacgataatcatgctaacttttcgtaattgcttgattgaaatatgcttagaataatgcctctttgttctacatggcaaatagggaccattatggtgtaacaccctgggaaccacaaacaccccgaaatgctactaaactacacaactaaccttcatatataaaatttcgacagcatctcctttgaaaatttgcatagacgtggaagcaacagagtataaacagatctagctagctaagtttaaacggccggccaaacgtgcaagcgctactagacaattcagtacattaaaaacgtccgcaatgtgttattaagttgtctaagcgtcaatttatttacaattgaatatatcctgcca

SEQ ID NO: 159 - DNA, 15431 bp, Artificial Sequence
  RV026523 T-DNA
aattacaacggtatatatcctgtcagccaacaccaaaacatcaaaaaaatcgggatcaggatcaggatctgcggccgcatcctgcaggtttaaacggccggccttcactagctagctgctaagctcaaacgagcaggaagcaacgagagggtggcgcgcgaccgacgtgcgtacgtagcatgagcctgagtggagacgttggacgtgtatgtatatacctctctgcgtgttaactatgtacgtaagcggcaggcagtgcaataagtgtggctctgtagtatgtacgtgcgggtacgatgctgtaagctactgaggcaagtccataaataaataatgacacgtgcgtgttctataatctcttcgcttcttcatttgtccccttgcggagtttggcatccattgatgccgttacgctgagaacagacacagcagacgaaccaaaagtgagttcttgtatgaaactatgacccttcatcgctaggctcaaacagcaccccgtacgaacacagcaaattagtcatctaactattagcccctacatgtttcagacgatacataaatatagcccatccttagcaattagctattggccctgcccatcccaagcaatgatctcgaagtatttttaatatatagtatttttaatatgtagcttttaaaattagaagataattttgagacaaaaatctccaagtatttttttgggtattttttactgcctccgtttttctttatttctcgtcacctagtttaattttgtgctaatcggctataaacgaaacagagagaaaagttactctaaaagcaactccaacagattagatataaatcttatatcctgcctagagctgttaaaaagatagacaactttagtggattagtgtatgcaacaaactctccaaatttaagtatcccaactacccaacgcatatcgttcccttttcattggcgcacgaactttcacctgctatagccgacgtacatgttcgttttttttgggcggcgcttactttcttccccgttcgttctcagcatcgcaactcaatttgttatggcggagaagcccttgtatcccaggtagtaatgcacagatatgcattattattattcataaaatcgagctagttaccctatgaggtgacatgaagcgctcacggttactatgacggttagcttcacgactgttggtggcagtagcgtacgacttagctatagttccggacttacctaactgactagagtcacacttagctgaccctagtcacttaggcgcgccaagcttggatctcctgcaggatctggccggccggatgggcggatctcgtacctcaactttgtatagaaaagttgggccagaatggcccggaccgggttaccaagcggccgcgaattccagaagaccaaagggcaattgagacttttcaacaaagggtaatatcgggaaacctcctcggattccattgcccagctatctgtcacttcatcaaaaggacagtagaaaaggaaggtggcacctacaaatgccatcattgcgataaaggaaaggctatcgttcaagatgcctctgccgacagtggtcccaaagatggacccccacccacgaggagcatcgtggaaaaagaagacgttccaaccacgtcttcaaagcaagtggattgatgtgatatctccactgacgtaagggatgacgcacaatcccactatccttcgcaagacccttcctctatataaggaagttcatttcatttggagaggacccatggaagctcaacagcaacagcataatacaatgatgggtgatgaccttggcggtggcaagttggcagccaccagcttcacaagagcgcaaaccaacagcagcaacaaccacagcctagttaataacaacggcggcagaagaagcagcacgaggtggacaccaacaacagaccagataagaatactcaaagatctttactacaacaatggagtgaggtctcccacggtggagcagattcagaggatctctgctaggttgagacagtacggtaagatcgagggcaaaaatgtcttctactggtttcagaaccaaaaggctcgtgaaagacagaagaggaggttcaacacaaccagcaccaccaacaacaacactgctcccgctcctctccctccatcttctactgtttgtaaaccttcttcgctagactcatccactccacacattcacactgcagcagcagctgctgctgctgcctccaaatactcagacatcaacaacaaccaaaaccttatctacccagctgggcacaatcagatgtcaggtttcggatatgctgcctccgtaacaatggagaagagcttcagagattgttctatatcgacgggcgggtcatctttcggttgggctaaaggaggaatgacagatcaccatctgtctcgtcatccctacccgcacacttcaccctatgcaatctacaaccagcggaaatcaataaacagtgatgagtatcacgagctactggcatcatcaacttcggatcatcatgaacatggggataatcggggtccggagattgaaaccctgccactatttcccatgcacggcgaggacatcaactacggcttctgccaccttaattcagccgagactgatggctggttcaatcgcgatgtgggtagtggctctcgtgcgtccctcgagctcagtctcaactcttacgcaggaatggaccacacctagggtacctgacatcttatagtctgcaacctctcgtgtctgaattcctatctttatcaagtgttattgcttccacgactataggacagctttcgtcgaaaggttttgctcatgtgatctcgaaggattcatctagtctgatttttcgtgacttgtatcggttttattggattcatccaacatatatcaataaaaaatgagttgtgtttcctttcttcctagttcagttaaaattatttccctcctgcgcttgtgctgtaattgtctgtgtacctgttgtttgtgactgtgttagttcccttggatatgatttcgtatttgatatgtacatggagatagcttagcttcattattggagtatgaagttagtatgacatagtcactctcctggaaaattgacactgcaaaccatatttttattctgaaccacaaatcctagtcagtccgctggcatatgccgtccgtttgctgaatccagaacgtgggtttggagatgtacggctgagatgcctctatgcgaaggggatttcgtggtgaaacgagatgggagtagagcaacgcccgtggaagatgcttcaaacttccacacttttgagcaacgatcggcagtagtaaggtagacgatttcaagatcaaagcatatgaagataaacaacatcaacaacaaaatttgttggggttctatagagagaaacagagctacatacatacactgttttgtatctaccatctgagatgatgaaaagatgaaaaactaaagaatgccccggcgccaacgccaggacacgccgcgcgcgcgtcacccgagccatctcttgacccagccggcgctgtatatttacacacgttgcagcatcgatcaccacctgttcgatcgcgtcgccgtcaccaagcttggcgcgccggtcacccggtccgggcctagaaggccacccggggctcggcgttaggcttttagtccgctaggtggctagaccgaggttaggacgctagttcactaggggcctagtggtgttttaaggatgggcaagtttgtacaaaaaagcaggctggcgccggaaccaattcagtcgagtgcggccgccagtgtgatggatatctcgacccgggtgattgcggttacatcatgtacggaaaaataattctaatccttgatttaaatttgaacttgactatttatttattctttatttcattttgtaaatcattttatgtatctcctggcaagcaattttatccaccttgcaccaacaccttcgggttccataatcaaaccaccttaacttcacaccatgctgtaactcacaccgcccagcatctccaatgtgaaagaagctaaaatttaataaacaatcatacgaagcagtgacaaaataccagatggtattaatgcttcgataaaattaattggaaagtataaaatggtagaaaataataaattataattaatttaagtaagataaaaaataattaaaaactaaaatgttaaaattttaaaaaaattattttaaataatatttaaaaacattaaaaatcattttaaaaaatttatttatagaacaattaaataaatatttcagctaataaaaaacaaaagcttacctagccttagaagacaacttgtccaacaattagatgatacccattgcccttacgttttctttaacatcaattattgtttttgtcaacaagctatcttttagttttattttattggtaaaaaatatgtcgccttcaagttgcatcatttaacacatctcgtcattagaaaaataaaactcttccctaaacgattagtagaaaaaatcattcgataataaataagaaagaaaaattagaaaaaaataacttcattttaaaaaaatcattaaggctatattttttaaatgactaattttatatagactgtaactaaaagtatacaatttattatgctatgtatcttaaagaattacttataaaaatctacggaagaatatcttacaaagtgaaaaacaaatgagaaagaatttagtgggatgattatgattttatttgaaaattgaaaaaataattattaaagactttagtggagtaagaaagctttcctattagtcttttcttatccataaaaaaaaaaaaaaaaatctagcgtgacagcttttccatagattttaataatgtaaaatactggtagcagccgaccgttcaggtaatggacactgtggtcctaacttgcaacgggtgcgggcccaatttaataacgccgtggtaacggataaagccaagcgtgaagcggtgaaggtacatctctgactccgtcaagattacgaaaccgtcaactacgaaggactccccgaaatatcatctgtgtcataaacaccaagtcacaccatacatgggcacgcgtcacaatatgattggagaacggttccaccgcatatgctataaaatgcccccacacccctcgaccctaatcgcacttcaattgcaatcaaattagttcattctctttgcgcagttccctacctctcctttcaaggttcgtagatttcttccgtttttttttcttcttctttattgtttgttctacatcagcatgatgttgatttgattgtgttttctatcgtttcatcgattataaattttcataatcagaagattcagcttttattaatgcaagaacgtccttaattgatgattttataaccgtaaattaggtctaattagagtttttttcataaagattttcagatccgtttacaacaagccttaattgttgattctgtagtcgtagattaaggtttttttcatgaactacttcagatccgttaaacaacagccttatttgttgatacttcagtcgtttttcaagaaattgttcagatccgttgataaaagccttattcgttgattctgtatggtatttcaagagatattgctcaggtcctttagcaactaccttatttgttgattctgtggccatagattaggattttttttcacgaaattgcttcttgaaattacgtgatggattttgattctgatttatcttgtgattgttgactctacagccatggcccacagcaagcacggcctgaaggaggagatgaccatgaagtaccacatggagggctgcgtgaacggccacaagttcgtgatcaccggcgagggcatcggctaccccttcaagggcaagcagaccatcaacctgtgcgtgatcgagggcggccccctgcccttcagcgaggacatcctgagcgccggcttcaagtacggcgaccggatcttcaccgagtacccccaggacatcgtggactacttcaagaacagctgccccgccggctacacctggggccggagcttcctgttcgaggacggcgccgtgtgcatctgtaacgtggacatcaccgtgagcgtgaaggagaactgcatctaccacaagagcatcttcaacggcgtgaacttccccgccgacggccccgtgatgaagaagatgaccaccaactgggaggccagctgcgagaagatcatgcccgtgcctaagcagggcatcctgaagggcgacgtgagcatgtacctgctgctgaaggacggcggccggtaccggtgccagttcgacaccgtgtacaaggccaagagcgtgcccagcaagatgcccgagtggcacttcatccagcacaagctgctgcgggaggaccggagcgacgccaagaaccagaagtggcagctgaccgagcacgccatcgccttccccagcgccctggcctgagagctcgaatttccccgatcgttcaaacatttggcaataaagtttcttaagattgaatcctgttgccggtcttgcgatgattatcatataatttctgttgaattacgttaagcatgtaataattaacatgtaatgcatgacgttatttatgagatgggtttttatgattagagtcccgcaattatacatttaatacgcgatagaaaacaaaatatagcgcgcaaactaggataaattatcgcgcgcggtgtcatctatgttactagatcgggaattctagtggccggcccagctgatatctagacccagctttcttgtacaaagtggccgttaacggatcggccagaatggcccggaccgggttaccgaattcgagctcggtaccctgggatccgatatcgatgggccctggccgaagcttggtcacccggtccgggcctagaaggccagcttcggccgccccgggcaactttattatacaaagttgatggtacggatccgtcgacggcgcgccgcggacctgaattccagcacactggcggccgttagtctaaaaacggcccctaactaacgcttagttgcccgctagattagtcccccgttagtgcctagttagacacacgacgaactaggggctactagtaacggccgccagtgtgctcggtacggccagaatggccatctggattcagcagggggtgattgcggttacatcatgtacggaaaaataattctaatccttgatttaaatttgaacttgactatttatttattctttatttcattttgtaaatcattttatgtatctcctggcaagcaattttatccaccttgcaccaacaccttcgggttccataatcaaaccaccttaacttcacaccatgctgtaactcacaccgcccagcatctccaatgtgaaagaagctaaaatttaataaacaatcatacgaagcagtgacaaaataccagatggtattaatgcttcgataaaattaattggaaagtataaaatggtagaaaataataaattataattaatttaagtaagataaaaaataattaaaaactaaaatgttaaaattttaaaaaaattattttaaataatatttaaaaacattaaaaatcattttaaaaaatttatttatagaacaattaaataaatatttcagctaataaaaaacaaaagcttacctagccttagaagacaacttgtccaacaattagatgatacccattgcccttacgttttctttaacatcaattattgtttttgtcaacaagctatcttttagttttattttattggtaaaaaatatgtcgccttcaagttgcatcatttaacacatctcgtcattagaaaaataaaactcttccctaaacgattagtagaaaaaatcattcgataataaataagaaagaaaaattagaaaaaaataacttcattttaaaaaaatcattaaggctatattttttaaatgactaattttatatagactgtaactaaaagtatacaatttattatgctatgtatcttaaagaattacttataaaaatctacggaagaatatcttacaaagtgaaaaacaaatgagaaagaatttagtgggatgattatgattttatttgaaaattgaaaaaataattattaaagactttagtggagtaagaaagctttcctattagtcttttcttatccataaaaaaaaaaaaaaaaatctagcgtgacagcttttccatagattttaataatgtaaaatactggtagcagccgaccgttcaggtaatggacactgtggtcctaacttgcaacgggtgcgggcccaatttaataacgccgtggtaacggataaagccaagcgtgaagcggtgaaggtacatctctgactccgtcaagattacgaaaccgtcaactacgaaggactccccgaaatatcatctgtgtcataaacaccaagtcacaccatacatgggcacgcgtcacaatatgattggagaacggttccaccgcatatgctataaaatgcccccacacccctcgaccctaatcgcacttcaattgcaatcaaattagttcattctctttgcgcagttccctacctctcctttcaaggttcgtagatttcttccgtttttttttcttcttctttattgtttgttctacatcagcatgatgttgatttgattgtgttttctatcgtttcatcgattataaattttcataatcagaagattcagcttttattaatgcaagaacgtccttaattgatgattttataaccgtaaattaggtctaattagagtttttttcataaagattttcagatccgtttacaacaagccttaattgttgattctgtagtcgtagattaaggtttttttcatgaactacttcagatccgttaaacaacagccttatttgttgatacttcagtcgtttttcaagaaattgttcagatccgttgataaaagccttattcgttgattctgtatggtatttcaagagatattgctcaggtcctttagcaactaccttatttgttgattctgtggccatagattaggattttttttcacgaaattgcttcttgaaattacgtgatggattttgattctgatttatcttgtgattgttgactctacagccatggctgcaactactcttacatctgctttacctggtgctttcagttcatcccagagaccaagtgctcctttcaacttacaaagatcacctagagtgcttagaaggttcaacagaaagacaggacgtcaacctcgtggacttgttcgtgctgcaaaggctcaagcggcgcaaaacctgccagagaaattcgatgaaacaagactctgggaggccctcaggggatttggggttagtccaagtagggttacttacgctcccgtcggattcggagattaccactggaccgtcacagatgaagacgggagaccttggttcgcaactgtcagtgacctcgaacacaaagagcattgcgggcagggagcacaagcagcccttaaaggactcagacaagctatggacactgccctcgcacttagagatagggacggactcagattcgtggttgctccagtggcagcaacagatgggggtggccctgtccttccccttgacgctaggtatgcactcacagtcttccctcacgtcccaggaagaacaggagagttcggacaaagactcacagaggcagagagggacagactgcttgctcttctggcagaactccacggaagaacacctcctgaaacaaccccaccagccgatatggaaccaccaggacttcctggtgttagagcagcactcgccgaaagtgaaggaccttggagtggaggaccatttgcagaacccgctagacttcttctcagagaacacgaggccacactgcacgcaagactcgctgaattcgaagccctcgtcgcaagagttaagggtcgtggagcacctcttgtcgttacccacggagaaccacacccaggcaacttgatcctcggagaggaaggctatctcctcgtggactgggatacagttggactggctccagctgaaagggatttgagtctcatctcagacgacccagctgacctcgcaagatacgcagagcttacaggaagaactccagacccagacgcactcgcactctatagactgcgttggagtctccttgatgtggctgagttcgtcgagtggttcagggctgaacaccaaagaacccaagacaccgagagtgcatggaaggggttcactgacacacttgggcaattggctgctggtggatcagctgcatagcaaacttatctctgttatgaatcagaagaagttcatgtctcgtttcatttaaaactttggtggtttgtgttttggggccttgtaaagcccctgatgaataattgttcaactatgtttccgttcctgtgttatacctttctttctaatgagtaatgacatcaaacttcttctgtattgaaattatgtccttgtgagtctctttatcatcgtttcgtctttacattatatgtgctacttttgtctaatgagcctgaaaagtggctccaatggtacgcactggaagatttgttggcttctggtagatatagcgacagtgttgagcttgtaatatcatgtctcttattgctaaattagttcctttcttaacagaaaccttcaaagtttttgtttttgttttcatttacctaatgtacacatacgctggccatgactaacaacatgtccaggcttagagcatatttttttctagcttaaattgttaacttgtcattcagtaaaatccgagaattgtgaagctctaattgaagctaattcgttttataaagtcagttaaaaagtatactaaattatccaacttttcttcaaaatctcaaaattctatgacaaaacgatagtctttgtttatgtcagtaccacaaagaggtggaaaaaaacaccaaaaaaacaataagcaaactatacactgagaagaaaaataaaagagagctcaatagatgttttatactaacggtagattagatcaaagatccaagctttactctacatagagcagaacccagaatcccttcatatctcttttattctagcaccgataatctactgaaaagaagacacttagagctctgtctctttgtcaaagaagtcccagccgtcatccagaagctccttacgttcattaacagaggccgcaattggatcgggtttacttattttgtgggtatctatacttttattagatttttaatcaggctcctgatttctttttatttcgattgaattcctgaacttgtattattcagtagatcgaataaattataaaaagataaaatcataaaataatattttatcctatcaatcatattaaagcaatgaatatgtaaaattaatcttatctttattttaaaaaatcatataggtttagtatttttttaaaaataaagataggattagttttactattcactgcttattacttttaaaaaaatcataaaggtttagtatttttttaaaataaatataggaatagttttactattcactgctttaatagaaaaatagtttaaaatttaagatagttttaatcccagcatttgccacgtttgaacgtgagccgaaacgatgtcgttacattatcttaacctagctgaaacgatgtcgtcataatatcgccaaatgccaactggactacgtcgaacccacaaatcccacaaagcgcgtgaaatcaaatcgctcaaaccacaaaaaagaacaacgcgtttgttacacgctcaatcccacgcgagtagagcacagtaaccttcaaataagcgaatggggcataatcagaaatccgaaataaacctaggggcattatcggaaatgaaaagtagctcactcaatataaaaatctaggaaccctagttttcgttatcactctgtgctccctcgctctatttctcagtctctgtgtttgcggctgaggattccgaacgagtgaccttcttcgtttctcgcaaaggtaacagcctctgctcttgtctcttcgattcgatctatgcctgtctcttatttacgatgatgtttcttcggttatgtttttttatttatgctttatgctgttgatgttcggttgtttgtttcgctttgtttttgtggttcagttttttaggattcttttggtttttgaatcgattaatcggaagagattttcgagttatttggtgtgttggaggtgaatcttttttttgaggtcatagatctgttgtatttgtgttataaacatgcgactttgtatgattttttacgaggttatgatgttctggttgttttattatgaatctgttgagacagaaccatgatttttgttgatgttcgtttacactattaaaggtttgttttaacaggattaaaagttttttaagcatgttgaaggagtcttgtagatatgtaaccgtcgatagtttttttgtgggtttgttcacatgttatcaagcttaatcttttactatgtatgcgaccatatctggatccagcaaaggcgattttttaattccttgtgaaacttttgtaatatgaagttgaaattttgttattggtaaactataaatgtgtgaagttggagtatacctttaccttcttatttggctttgtgatagtttaatttatatgtattttgagttctgacttgtatttctttgaattgattctagtttaagtaatcatggcctcctccgagaacgtcatcaccgagttcatgcgcttcaaggtgcgcatggagggcaccgtgaacggccacgagttcgagatcgagggcgagggcgagggccgcccctacgagggccacaacaccgtgaagctgaaggtgacgaagggcggccccctgcccttcgcctgggacatcctgtccccccagttccagtacggctccaaggtgtacgtgaagcaccccgccgacatccccgactacaagaagctgtccttccccgagggcttcaagtgggagcgcgtgatgaacttcgaggacggcggcgtggcgaccgtgacccaggactcctccctgcaggacggctgcttcatctacaaggtgaagttcatcggcgtgaacttcccctccgacggccccgtgatgcagaagaagaccatgggctgggaggcctccaccgagcgcctgtacccccgcgacggcgtgctgaagggcgagacccacaaggccctgaagctgaaggacggcggccactacctggtggagttcaagtccatctacatggccaagaagcccgtgcagctgcccggctactactacgtggacgccaagctggacatcacctcccacaacgaggactacaccatcgtggagcagtacgagcgcaccgagggccgccaccacctgttcctgtagttttgtgatctgatgataagtggttggttcgtgtctcatgcacttgggaggtgatctatttcacctggtgtagtttgtgtttccgtcagttggaaaaacttatccctatcgatttcgttttcattttctgcttttcttttatgtaccttcgtttgggcttgtaacgggcctttgtatttcaactctcaataataatccaagtgcatgttaaacaatttgtcatctgtttcggctttgatatactactggtgaagatgggccgtactactgcatcacaacgaaaaataataataagatgaaaaacttgaagtggaaaaaaaaaaaaacttgaatgttcactactactcattgaccataatgtttaacatacatagctcaatagtatttttgtgaatatggcaacacaaacagtccaaaacaattgtctcttactataccaaaccaagggcgccgcttgtttgccactctttgtgtgcaatagtgtgattaccacatctccacattcaatatattccctgaattatctgacgattttgatggctcactgttttcccaagtcttgaattgtcttctgtgcgccagtcaaatgcatatgtgttgagtttatcttttaaatatcaagcttttgtttttaacttttgtttgtaaccaaaaactcacagtaggagtttgatcacataattttatgtttgcctttgcaatttctagtgagtctttgattaaaagcttgaaaagaaaatgcagccaagcttaccaagtaagttatgtgtattaaccagaggaagagagaatcttgcaaaatttcaacaaacacaaaaagaagtattactacgattggtggagaaagaaaacgattccaaatcttgaactgttgttgtaaaagcatagcagaaagtgggagacaaccgaaatagaaatgactataacttaatttaatgttatcattataatttcttctagcaaatatttagaaagtaaatatcacatcaacctttaatgtaattaagctttctctttttgattcatgtgagatgaaaagaaaaaaaagaagagaaaagtgtagaaaacacatcatttctaagctgaagctgaggtacaaattaattaataagtgactagggtcacgtgaccctagtcacttatgattccgatgacttcgtaggttcctagctcaagccgctcgtgtccaagcgtcacttacgattagctaatgattacggcatctaggaccgactagttcttatgtgcttctagtctccaaatgtggttgatagttattttgctctaagatcaacagtaatgaagtataaatcatcgttgtggtgtgctactcggttaattgagcattaacacacacaaacatgacgaggatggtataatctccaaaaatgtgtactttgttaggtgggaccctatagccttgattaatgtgctatgttaggcatgcctggaaacgtgtgacgcatatgttttgtgaacctgttgatattatatgtgcttttatattaccatattttattaaaatactaatatttattactagtaagatataacattctatctagcttaaaaactaaccataaatattccataataactagatttaccaaactaatatactaaatatacataataaatacaaaattaacaagacaataatcaatatttatgagcttaatatatttagacattatggttggtcgacgataatcatgctaacttttcgtaattgcttgattgaaatatgcttagaataatgcctctttgttctacatggcaaatagggaccattatggtgtaacaccctgggaaccacaaacaccccgaaatgctactaaactacacaactaaccttcatatataaaatttcgacagcatctcctttgaaaatttgcatagacgtggaagcaacagagtataaacagatctagctagctaagtttaaacggccggccaaacgtgcaagcgctactagacaattcagtacattaaaaacgtccgcaatgtgttattaagttgtctaagcgtcaatttatttacaattgaatatatcctgcca

SEQ ID NO: 160 - DNA, 15349 bp, Artificial Sequence
  RV026530 T-DNA
caaacaaacatacacagcgatttattcacacgaacccgaattacaacggtatatatcctgtcagccaacaccaaaacatcaaaaaaatcgggatcaggatcaggatctgcggccgcatcctgcaggtttaaacggccggccttcactagctagctgctaagctcaaacgagcaggaagcaacgagagggtggcgcgcgaccgacgtgcgtacgtagcatgagcctgagtggagacgttggacgtgtatgtatatacctctctgcgtgttaactatgtacgtaagcggcaggcagtgcaataagtgtggctctgtagtatgtacgtgcgggtacgatgctgtaagctactgaggcaagtccataaataaataatgacacgtgcgtgttctataatctcttcgcttcttcatttgtccccttgcggagtttggcatccattgatgccgttacgctgagaacagacacagcagacgaaccaaaagtgagttcttgtatgaaactatgacccttcatcgctaggctcaaacagcaccccgtacgaacacagcaaattagtcatctaactattagcccctacatgtttcagacgatacataaatatagcccatccttagcaattagctattggccctgcccatcccaagcaatgatctcgaagtatttttaatatatagtatttttaatatgtagcttttaaaattagaagataattttgagacaaaaatctccaagtatttttttgggtattttttactgcctccgtttttctttatttctcgtcacctagtttaattttgtgctaatcggctataaacgaaacagagagaaaagttactctaaaagcaactccaacagattagatataaatcttatatcctgcctagagctgttaaaaagatagacaactttagtggattagtgtatgcaacaaactctccaaatttaagtatcccaactacccaacgcatatcgttcccttttcattggcgcacgaactttcacctgctatagccgacgtacatgttcgttttttttgggcggcgcttactttcttccccgttcgttctcagcatcgcaactcaatttgttatggcggagaagcccttgtatcccaggtagtaatgcacagatatgcattattattattcataaaatcgagctagttaccctatgaggtgacatgaagcgctcacggttactatgacggttagcttcacgactgttggtggcagtagcgtacgacttagctatagttccggacttacctaactgactagagtcacacttagctgaccctagtcacttaggcgcgccaagcttggatctcctgcaggatctggccggccggatgggcggatctcgtacctcaactttgtatagaaaagttgggccagaatggcccggaccgggttaccaagcggccgcgaattccagaagaccaaagggcaattgagacttttcaacaaagggtaatatcgggaaacctcctcggattccattgcccagctatctgtcacttcatcaaaaggacagtagaaaaggaaggtggcacctacaaatgccatcattgcgataaaggaaaggctatcgttcaagatgcctctgccgacagtggtcccaaagatggacccccacccacgaggagcatcgtggaaaaagaagacgttccaaccacgtcttcaaagcaagtggattgatgtgatatctccactgacgtaagggatgacgcacaatcccactatccttcgcaagacccttcctctatataaggaagttcatttcatttggagaggacccatggaaccccagcaacagcaacagcaaaaccaacaagctccaaatgaggattgtggtggtggcagtggcaaaggaagctttctttgcaggcaaagtagtacacggtggactcctaccactgaccagattagaatattgaaggacctttactacaacaatggagttaggtccccgagtgctgatcagattcaaaggatctctgctagacttagacagtacggaaaaatcgaaggcaagaatgtcttttattggtttcagaaccacaaggctcgtgagaggcagaagaaaaggttcaccaccacgactaatcatcatgtccccatgcaaagccctaccactgctgcaaataacaagtatcccaacataactcctggttattctcctacatctctttcttcaactggtgctcttactgttgggcagataggaaactatggctatgggtctataactatggaaaagagttttagggattgctcaatatcagcatgtggtagtagtacaagtgtaggcgaatccctgagtcacaactttggatgggttgggttcgatcctacttattcttcgtcctacacattctttgagcacaaaaaattcatggaagagagacaaaaagatgaagatgatgcagaagaagaagctgctgctccacaaattgagaccctccctctctttcccatgcacagtgaagacgctaatggtttttgcagtaatattaggcccagactagacagctgctactctgggtggtacaggtctgaagatggctacactggttctcgtgcctcacttgagctcagcctcaacccatatgcaggcagaccgcaagattctatctgaggtacctgacatcttatagtctgcaacctctcgtgtctgaattcctatctttatcaagtgttattgcttccacgactataggacagctttcgtcgaaaggttttgctcatgtgatctcgaaggattcatctagtctgatttttcgtgacttgtatcggttttattggattcatccaacatatatcaataaaaaatgagttgtgtttcctttcttcctagttcagttaaaattatttccctcctgcgcttgtgctgtaattgtctgtgtacctgttgtttgtgactgtgttagttcccttggatatgatttcgtatttgatatgtacatggagatagcttagcttcattattggagtatgaagttagtatgacatagtcactctcctggaaaattgacactgcaaaccatatttttattctgaaccacaaatcctagtcagtccgctggcatatgccgtccgtttgctgaatccagaacgtgggtttggagatgtacggctgagatgcctctatgcgaaggggatttcgtggtgaaacgagatgggagtagagcaacgcccgtggaagatgcttcaaacttccacacttttgagcaacgatcggcagtagtaaggtagacgatttcaagatcaaagcatatgaagataaacaacatcaacaacaaaatttgttggggttctatagagagaaacagagctacatacatacactgttttgtatctaccatctgagatgatgaaaagatgaaaaactaaagaatgccccggcgccaacgccaggacacgccgcgcgcgcgtcacccgagccatctcttgacccagccggcgctgtatatttacacacgttgcagcatcgatcaccacctgttcgatcgcgtcgccgtcaccaagcttggcgcgccggtcacccggtccgggcctagaaggccacccggggctcggcgttaggcttttagtccgctaggtggctagaccgaggttaggacgctagttcactaggggcctagtggtgttttaaggatgggcaagtttgtacaaaaaagcaggctggcgccggaaccaattcagtcgagtgcggccgccagtgtgatggatatctcgacccgggtgattgcggttacatcatgtacggaaaaataattctaatccttgatttaaatttgaacttgactatttatttattctttatttcattttgtaaatcattttatgtatctcctggcaagcaattttatccaccttgcaccaacaccttcgggttccataatcaaaccaccttaacttcacaccatgctgtaactcacaccgcccagcatctccaatgtgaaagaagctaaaatttaataaacaatcatacgaagcagtgacaaaataccagatggtattaatgcttcgataaaattaattggaaagtataaaatggtagaaaataataaattataattaatttaagtaagataaaaaataattaaaaactaaaatgttaaaattttaaaaaaattattttaaataatatttaaaaacattaaaaatcattttaaaaaatttatttatagaacaattaaataaatatttcagctaataaaaaacaaaagcttacctagccttagaagacaacttgtccaacaattagatgatacccattgcccttacgttttctttaacatcaattattgtttttgtcaacaagctatcttttagttttattttattggtaaaaaatatgtcgccttcaagttgcatcatttaacacatctcgtcattagaaaaataaaactcttccctaaacgattagtagaaaaaatcattcgataataaataagaaagaaaaattagaaaaaaataacttcattttaaaaaaatcattaaggctatattttttaaatgactaattttatatagactgtaactaaaagtatacaatttattatgctatgtatcttaaagaattacttataaaaatctacggaagaatatcttacaaagtgaaaaacaaatgagaaagaatttagtgggatgattatgattttatttgaaaattgaaaaaataattattaaagactttagtggagtaagaaagctttcctattagtcttttcttatccataaaaaaaaaaaaaaaaatctagcgtgacagcttttccatagattttaataatgtaaaatactggtagcagccgaccgttcaggtaatggacactgtggtcctaacttgcaacgggtgcgggcccaatttaataacgccgtggtaacggataaagccaagcgtgaagcggtgaaggtacatctctgactccgtcaagattacgaaaccgtcaactacgaaggactccccgaaatatcatctgtgtcataaacaccaagtcacaccatacatgggcacgcgtcacaatatgattggagaacggttccaccgcatatgctataaaatgcccccacacccctcgaccctaatcgcacttcaattgcaatcaaattagttcattctctttgcgcagttccctacctctcctttcaaggttcgtagatttcttccgtttttttttcttcttctttattgtttgttctacatcagcatgatgttgatttgattgtgttttctatcgtttcatcgattataaattttcataatcagaagattcagcttttattaatgcaagaacgtccttaattgatgattttataaccgtaaattaggtctaattagagtttttttcataaagattttcagatccgtttacaacaagccttaattgttgattctgtagtcgtagattaaggtttttttcatgaactacttcagatccgttaaacaacagccttatttgttgatacttcagtcgtttttcaagaaattgttcagatccgttgataaaagccttattcgttgattctgtatggtatttcaagagatattgctcaggtcctttagcaactaccttatttgttgattctgtggccatagattaggattttttttcacgaaattgcttcttgaaattacgtgatggattttgattctgatttatcttgtgattgttgactctacagccatggcccacagcaagcacggcctgaaggaggagatgaccatgaagtaccacatggagggctgcgtgaacggccacaagttcgtgatcaccggcgagggcatcggctaccccttcaagggcaagcagaccatcaacctgtgcgtgatcgagggcggccccctgcccttcagcgaggacatcctgagcgccggcttcaagtacggcgaccggatcttcaccgagtacccccaggacatcgtggactacttcaagaacagctgccccgccggctacacctggggccggagcttcctgttcgaggacggcgccgtgtgcatctgtaacgtggacatcaccgtgagcgtgaaggagaactgcatctaccacaagagcatcttcaacggcgtgaacttccccgccgacggccccgtgatgaagaagatgaccaccaactgggaggccagctgcgagaagatcatgcccgtgcctaagcagggcatcctgaagggcgacgtgagcatgtacctgctgctgaaggacggcggccggtaccggtgccagttcgacaccgtgtacaaggccaagagcgtgcccagcaagatgcccgagtggcacttcatccagcacaagctgctgcgggaggaccggagcgacgccaagaaccagaagtggcagctgaccgagcacgccatcgccttccccagcgccctggcctgagagctcgaatttccccgatcgttcaaacatttggcaataaagtttcttaagattgaatcctgttgccggtcttgcgatgattatcatataatttctgttgaattacgttaagcatgtaataattaacatgtaatgcatgacgttatttatgagatgggtttttatgattagagtcccgcaattatacatttaatacgcgatagaaaacaaaatatagcgcgcaaactaggataaattatcgcgcgcggtgtcatctatgttactagatcgggaattctagtggccggcccagctgatatctagacccagctttcttgtacaaagtggccgttaacggatcggccagaatggcccggaccgggttaccgaattcgagctcggtaccctgggatccgatatcgatgggccctggccgaagcttggtcacccggtccgggcctagaaggccagcttcggccgccccgggcaactttattatacaaagttgatggtacggatccgtcgacggcgcgccgcggacctgaattccagcacactggcggccgttagtctaaaaacggcccctaactaacgcttagttgcccgctagattagtcccccgttagtgcctagttagacacacgacgaactaggggctactagtaacggccgccagtgtgctcggtacggccagaatggccatctggattcagcagggggtgattgcggttacatcatgtacggaaaaataattctaatccttgatttaaatttgaacttgactatttatttattctttatttcattttgtaaatcattttatgtatctcctggcaagcaattttatccaccttgcaccaacaccttcgggttccataatcaaaccaccttaacttcacaccatgctgtaactcacaccgcccagcatctccaatgtgaaagaagctaaaatttaataaacaatcatacgaagcagtgacaaaataccagatggtattaatgcttcgataaaattaattggaaagtataaaatggtagaaaataataaattataattaatttaagtaagataaaaaataattaaaaactaaaatgttaaaattttaaaaaaattattttaaataatatttaaaaacattaaaaatcattttaaaaaatttatttatagaacaattaaataaatatttcagctaataaaaaacaaaagcttacctagccttagaagacaacttgtccaacaattagatgatacccattgcccttacgttttctttaacatcaattattgtttttgtcaacaagctatcttttagttttattttattggtaaaaaatatgtcgccttcaagttgcatcatttaacacatctcgtcattagaaaaataaaactcttccctaaacgattagtagaaaaaatcattcgataataaataagaaagaaaaattagaaaaaaataacttcattttaaaaaaatcattaaggctatattttttaaatgactaattttatatagactgtaactaaaagtatacaatttattatgctatgtatcttaaagaattacttataaaaatctacggaagaatatcttacaaagtgaaaaacaaatgagaaagaatttagtgggatgattatgattttatttgaaaattgaaaaaataattattaaagactttagtggagtaagaaagctttcctattagtcttttcttatccataaaaaaaaaaaaaaaaatctagcgtgacagcttttccatagattttaataatgtaaaatactggtagcagccgaccgttcaggtaatggacactgtggtcctaacttgcaacgggtgcgggcccaatttaataacgccgtggtaacggataaagccaagcgtgaagcggtgaaggtacatctctgactccgtcaagattacgaaaccgtcaactacgaaggactccccgaaatatcatctgtgtcataaacaccaagtcacaccatacatgggcacgcgtcacaatatgattggagaacggttccaccgcatatgctataaaatgcccccacacccctcgaccctaatcgcacttcaattgcaatcaaattagttcattctctttgcgcagttccctacctctcctttcaaggttcgtagatttcttccgtttttttttcttcttctttattgtttgttctacatcagcatgatgttgatttgattgtgttttctatcgtttcatcgattataaattttcataatcagaagattcagcttttattaatgcaagaacgtccttaattgatgattttataaccgtaaattaggtctaattagagtttttttcataaagattttcagatccgtttacaacaagccttaattgttgattctgtagtcgtagattaaggtttttttcatgaactacttcagatccgttaaacaacagccttatttgttgatacttcagtcgtttttcaagaaattgttcagatccgttgataaaagccttattcgttgattctgtatggtatttcaagagatattgctcaggtcctttagcaactaccttatttgttgattctgtggccatagattaggattttttttcacgaaattgcttcttgaaattacgtgatggattttgattctgatttatcttgtgattgttgactctacagccatggctgcaactactcttacatctgctttacctggtgctttcagttcatcccagagaccaagtgctcctttcaacttacaaagatcacctagagtgcttagaaggttcaacagaaagacaggacgtcaacctcgtggacttgttcgtgctgcaaaggctcaagcggcgcaaaacctgccagagaaattcgatgaaacaagactctgggaggccctcaggggatttggggttagtccaagtagggttacttacgctcccgtcggattcggagattaccactggaccgtcacagatgaagacgggagaccttggttcgcaactgtcagtgacctcgaacacaaagagcattgcgggcagggagcacaagcagcccttaaaggactcagacaagctatggacactgccctcgcacttagagatagggacggactcagattcgtggttgctccagtggcagcaacagatgggggtggccctgtccttccccttgacgctaggtatgcactcacagtcttccctcacgtcccaggaagaacaggagagttcggacaaagactcacagaggcagagagggacagactgcttgctcttctggcagaactccacggaagaacacctcctgaaacaaccccaccagccgatatggaaccaccaggacttcctggtgttagagcagcactcgccgaaagtgaaggaccttggagtggaggaccatttgcagaacccgctagacttcttctcagagaacacgaggccacactgcacgcaagactcgctgaattcgaagccctcgtcgcaagagttaagggtcgtggagcacctcttgtcgttacccacggagaaccacacccaggcaacttgatcctcggagaggaaggctatctcctcgtggactgggatacagttggactggctccagctgaaagggatttgagtctcatctcagacgacccagctgacctcgcaagatacgcagagcttacaggaagaactccagacccagacgcactcgcactctatagactgcgttggagtctccttgatgtggctgagttcgtcgagtggttcagggctgaacaccaaagaacccaagacaccgagagtgcatggaaggggttcactgacacacttgggcaattggctgctggtggatcagctgcatagcaaacttatctctgttatgaatcagaagaagttcatgtctcgtttcatttaaaactttggtggtttgtgttttggggccttgtaaagcccctgatgaataattgttcaactatgtttccgttcctgtgttatacctttctttctaatgagtaatgacatcaaacttcttctgtattgaaattatgtccttgtgagtctctttatcatcgtttcgtctttacattatatgtgctacttttgtctaatgagcctgaaaagtggctccaatggtacgcactggaagatttgttggcttctggtagatatagcgacagtgttgagcttgtaatatcatgtctcttattgctaaattagttcctttcttaacagaaaccttcaaagtttttgtttttgttttcatttacctaatgtacacatacgctggccatgactaacaacatgtccaggcttagagcatatttttttctagcttaaattgttaacttgtcattcagtaaaatccgagaattgtgaagctctaattgaagctaattcgttttataaagtcagttaaaaagtatactaaattatccaacttttcttcaaaatctcaaaattctatgacaaaacgatagtctttgtttatgtcagtaccacaaagaggtggaaaaaaacaccaaaaaaacaataagcaaactatacactgagaagaaaaataaaagagagctcaatagatgttttatactaacggtagattagatcaaagatccaagctttactctacatagagcagaacccagaatcccttcatatctcttttattctagcaccgataatctactgaaaagaagacacttagagctctgtctctttgtcaaagaagtcccagccgtcatccagaagctccttacgttcattaacagaggccgcaattggatcgggtttacttattttgtgggtatctatacttttattagatttttaatcaggctcctgatttctttttatttcgattgaattcctgaacttgtattattcagtagatcgaataaattataaaaagataaaatcataaaataatattttatcctatcaatcatattaaagcaatgaatatgtaaaattaatcttatctttattttaaaaaatcatataggtttagtatttttttaaaaataaagataggattagttttactattcactgcttattacttttaaaaaaatcataaaggtttagtatttttttaaaataaatataggaatagttttactattcactgctttaatagaaaaatagtttaaaatttaagatagttttaatcccagcatttgccacgtttgaacgtgagccgaaacgatgtcgttacattatcttaacctagctgaaacgatgtcgtcataatatcgccaaatgccaactggactacgtcgaacccacaaatcccacaaagcgcgtgaaatcaaatcgctcaaaccacaaaaaagaacaacgcgtttgttacacgctcaatcccacgcgagtagagcacagtaaccttcaaataagcgaatggggcataatcagaaatccgaaataaacctaggggcattatcggaaatgaaaagtagctcactcaatataaaaatctaggaaccctagttttcgttatcactctgtgctccctcgctctatttctcagtctctgtgtttgcggctgaggattccgaacgagtgaccttcttcgtttctcgcaaaggtaacagcctctgctcttgtctcttcgattcgatctatgcctgtctcttatttacgatgatgtttcttcggttatgtttttttatttatgctttatgctgttgatgttcggttgtttgtttcgctttgtttttgtggttcagttttttaggattcttttggtttttgaatcgattaatcggaagagattttcgagttatttggtgtgttggaggtgaatcttttttttgaggtcatagatctgttgtatttgtgttataaacatgcgactttgtatgattttttacgaggttatgatgttctggttgttttattatgaatctgttgagacagaaccatgatttttgttgatgttcgtttacactattaaaggtttgttttaacaggattaaaagttttttaagcatgttgaaggagtcttgtagatatgtaaccgtcgatagtttttttgtgggtttgttcacatgttatcaagcttaatcttttactatgtatgcgaccatatctggatccagcaaaggcgattttttaattccttgtgaaacttttgtaatatgaagttgaaattttgttattggtaaactataaatgtgtgaagttggagtatacctttaccttcttatttggctttgtgatagtttaatttatatgtattttgagttctgacttgtatttctttgaattgattctagtttaagtaatcatggcctcctccgagaacgtcatcaccgagttcatgcgcttcaaggtgcgcatggagggcaccgtgaacggccacgagttcgagatcgagggcgagggcgagggccgcccctacgagggccacaacaccgtgaagctgaaggtgacgaagggcggccccctgcccttcgcctgggacatcctgtccccccagttccagtacggctccaaggtgtacgtgaagcaccccgccgacatccccgactacaagaagctgtccttccccgagggcttcaagtgggagcgcgtgatgaacttcgaggacggcggcgtggcgaccgtgacccaggactcctccctgcaggacggctgcttcatctacaaggtgaagttcatcggcgtgaacttcccctccgacggccccgtgatgcagaagaagaccatgggctgggaggcctccaccgagcgcctgtacccccgcgacggcgtgctgaagggcgagacccacaaggccctgaagctgaaggacggcggccactacctggtggagttcaagtccatctacatggccaagaagcccgtgcagctgcccggctactactacgtggacgccaagctggacatcacctcccacaacgaggactacaccatcgtggagcagtacgagcgcaccgagggccgccaccacctgttcctgtagttttgtgatctgatgataagtggttggttcgtgtctcatgcacttgggaggtgatctatttcacctggtgtagtttgtgtttccgtcagttggaaaaacttatccctatcgatttcgttttcattttctgcttttcttttatgtaccttcgtttgggcttgtaacgggcctttgtatttcaactctcaataataatccaagtgcatgttaaacaatttgtcatctgtttcggctttgatatactactggtgaagatgggccgtactactgcatcacaacgaaaaataataataagatgaaaaacttgaagtggaaaaaaaaaaaaacttgaatgttcactactactcattgaccataatgtttaacatacatagctcaatagtatttttgtgaatatggcaacacaaacagtccaaaacaattgtctcttactataccaaaccaagggcgccgcttgtttgccactctttgtgtgcaatagtgtgattaccacatctccacattcaatatattccctgaattatctgacgattttgatggctcactgttttcccaagtcttgaattgtcttctgtgcgccagtcaaatgcatatgtgttgagtttatcttttaaatatcaagcttttgtttttaacttttgtttgtaaccaaaaactcacagtaggagtttgatcacataattttatgtttgcctttgcaatttctagtgagtctttgattaaaagcttgaaaagaaaatgcagccaagcttaccaagtaagttatgtgtattaaccagaggaagagagaatcttgcaaaatttcaacaaacacaaaaagaagtattactacgattggtggagaaagaaaacgattccaaatcttgaactgttgttgtaaaagcatagcagaaagtgggagacaaccgaaatagaaatgactataacttaatttaatgttatcattataatttcttctagcaaatatttagaaagtaaatatcacatcaacctttaatgtaattaagctttctctttttgattcatgtgagatgaaaagaaaaaaaagaagagaaaagtgtagaaaacacatcatttctaagctgaagctgaggtacaaattaattaataagtgactagggtcacgtgaccctagtcacttatgattccgatgacttcgtaggttcctagctcaagccgctcgtgtccaagcgtcacttacgattagctaatgattacggcatctaggaccgactagttcttatgtgcttctagtctccaaatgtggttgatagttattttgctctaagatcaacagtaatgaagtataaatcatcgttgtggtgtgctactcggttaattgagcattaacacacacaaacatgacgaggatggtataatctccaaaaatgtgtactttgttaggtgggaccctatagccttgattaatgtgctatgttaggcatgcctggaaacgtgtgacgcatatgttttgtgaacctgttgatattatatgtgcttttatattaccatattttattaaaatactaatatttattactagtaagatataacattctatctagcttaaaaactaaccataaatattccataataactagatttaccaaactaatatactaaatatacataataaatacaaaattaacaagacaataatcaatatttatgagcttaatatatttagacattatggttggtcgacgataatcatgctaacttttcgtaattgcttgattgaaatatgcttagaataatgcctctttgttctacatggcaaatagggaccattatggtgtaacaccctgggaaccacaaacaccccgaaatgctactaaactacacaactaaccttcatatataaaatttcgacagcatctcctttgaaaatttgcatagacgtggaagcaacagagtataaacagatctagctagctaagtttaaacggccggccaaacgtgcaagcgctactagacaattcagtacattaaaaacgtccgcaatgtgttattaagttgtctaagcgtcaatttatttacaattgaatatatcctgcca

SEQ ID NO: 161 - DNA, 15440 bp, Artificial Sequence
  RV026527 T-DNA
aattacaacggtatatatcctgtcagccaacaccaaaacatcaaaaaaatcgggatcaggatcaggatctgcggccgcatcctgcaggtttaaacggccggccttcactagctagctgctaagctcaaacgagcaggaagcaacgagagggtggcgcgcgaccgacgtgcgtacgtagcatgagcctgagtggagacgttggacgtgtatgtatatacctctctgcgtgttaactatgtacgtaagcggcaggcagtgcaataagtgtggctctgtagtatgtacgtgcgggtacgatgctgtaagctactgaggcaagtccataaataaataatgacacgtgcgtgttctataatctcttcgcttcttcatttgtccccttgcggagtttggcatccattgatgccgttacgctgagaacagacacagcagacgaaccaaaagtgagttcttgtatgaaactatgacccttcatcgctaggctcaaacagcaccccgtacgaacacagcaaattagtcatctaactattagcccctacatgtttcagacgatacataaatatagcccatccttagcaattagctattggccctgcccatcccaagcaatgatctcgaagtatttttaatatatagtatttttaatatgtagcttttaaaattagaagataattttgagacaaaaatctccaagtatttttttgggtattttttactgcctccgtttttctttatttctcgtcacctagtttaattttgtgctaatcggctataaacgaaacagagagaaaagttactctaaaagcaactccaacagattagatataaatcttatatcctgcctagagctgttaaaaagatagacaactttagtggattagtgtatgcaacaaactctccaaatttaagtatcccaactacccaacgcatatcgttcccttttcattggcgcacgaactttcacctgctatagccgacgtacatgttcgttttttttgggcggcgcttactttcttccccgttcgttctcagcatcgcaactcaatttgttatggcggagaagcccttgtatcccaggtagtaatgcacagatatgcattattattattcataaaatcgagctagttaccctatgaggtgacatgaagcgctcacggttactatgacggttagcttcacgactgttggtggcagtagcgtacgacttagctatagttccggacttacctaactgactagagtcacacttagctgaccctagtcacttaggcgcgccaagcttggatctcctgcaggatctggccggccggatgggcggatctcgtacctcaactttgtatagaaaagttgggccagaatggcccggaccgggttaccaagcggccgcgaattccagaagaccaaagggcaattgagacttttcaacaaagggtaatatcgggaaacctcctcggattccattgcccagctatctgtcacttcatcaaaaggacagtagaaaaggaaggtggcacctacaaatgccatcattgcgataaaggaaaggctatcgttcaagatgcctctgccgacagtggtcccaaagatggacccccacccacgaggagcatcgtggaaaaagaagacgttccaaccacgtcttcaaagcaagtggattgatgtgatatctccactgacgtaagggatgacgcacaatcccactatccttcgcaagacccttcctctatataaggaagttcatttcatttggagaggacccatggaacatcatcatcagcagcagttccacggtggccagccgcagctgatgagtgaaaatgaagagatgaacaacaatgggagcgggggtgggagtagtaagagcagttttctttgcagacagtcgagcacaaggtggatacccactactgatcagataaggatactgaaggatctatactacaacagtggactgagatccccaaacgccgatcagatccaaagaatatccgccagactgaggcagtacggaaagatcgagggtaagaatgttttctactggtttcaaaatcacaaagcccgagagaggcagaagaagagactcaccgtcgatattgctgcagcggcaactaccaacaaattctccaacaacactaatatgtcttcttcttcttctccctcagggatttctcctgcttctcatgcagtgtatgcaggattagggcagatggggagcaatggcggtggatcagtcgtgatggagagaacttcttacatggagtgttccttgccaggtgggatgccgatgcccgtacctgaacccaatgtgggagtcggagtgggatgggtgagtgttgaaacaggagctactactatgcaacaattctactaccatcaacagagaccaaccacaccctttcctgctcctcatcatcaccaccattactacgacgacggttactattccaataataacaaacttcaagcccatcacctacatatacgcgaggaaaatcaacatccagaagatgacgacgaagaagaagaagaagaagaagaagatgaagagatagaaacacttccattgttcccaatccactcacaggagacacagtcttacttcctggaccaacaacatgcaatccacaatcaagaaagcaataacatggaaacctctttggagctcaccctaaactcctactatgctgcttccagtagcagtactccacatggatcagagcatgattaaggtacctgacatcttatagtctgcaacctctcgtgtctgaattcctatctttatcaagtgttattgcttccacgactataggacagctttcgtcgaaaggttttgctcatgtgatctcgaaggattcatctagtctgatttttcgtgacttgtatcggttttattggattcatccaacatatatcaataaaaaatgagttgtgtttcctttcttcctagttcagttaaaattatttccctcctgcgcttgtgctgtaattgtctgtgtacctgttgtttgtgactgtgttagttcccttggatatgatttcgtatttgatatgtacatggagatagcttagcttcattattggagtatgaagttagtatgacatagtcactctcctggaaaattgacactgcaaaccatatttttattctgaaccacaaatcctagtcagtccgctggcatatgccgtccgtttgctgaatccagaacgtgggtttggagatgtacggctgagatgcctctatgcgaaggggatttcgtggtgaaacgagatgggagtagagcaacgcccgtggaagatgcttcaaacttccacacttttgagcaacgatcggcagtagtaaggtagacgatttcaagatcaaagcatatgaagataaacaacatcaacaacaaaatttgttggggttctatagagagaaacagagctacatacatacactgttttgtatctaccatctgagatgatgaaaagatgaaaaactaaagaatgccccggcgccaacgccaggacacgccgcgcgcgcgtcacccgagccatctcttgacccagccggcgctgtatatttacacacgttgcagcatcgatcaccacctgttcgatcgcgtcgccgtcaccaagcttggcgcgccggtcacccggtccgggcctagaaggccacccggggctcggcgttaggcttttagtccgctaggtggctagaccgaggttaggacgctagttcactaggggcctagtggtgttttaaggatgggcaagtttgtacaaaaaagcaggctggcgccggaaccaattcagtcgagtgcggccgccagtgtgatggatatctcgacccgggtgattgcggttacatcatgtacggaaaaataattctaatccttgatttaaatttgaacttgactatttatttattctttatttcattttgtaaatcattttatgtatctcctggcaagcaattttatccaccttgcaccaacaccttcgggttccataatcaaaccaccttaacttcacaccatgctgtaactcacaccgcccagcatctccaatgtgaaagaagctaaaatttaataaacaatcatacgaagcagtgacaaaataccagatggtattaatgcttcgataaaattaattggaaagtataaaatggtagaaaataataaattataattaatttaagtaagataaaaaataattaaaaactaaaatgttaaaattttaaaaaaattattttaaataatatttaaaaacattaaaaatcattttaaaaaatttatttatagaacaattaaataaatatttcagctaataaaaaacaaaagcttacctagccttagaagacaacttgtccaacaattagatgatacccattgcccttacgttttctttaacatcaattattgtttttgtcaacaagctatcttttagttttattttattggtaaaaaatatgtcgccttcaagttgcatcatttaacacatctcgtcattagaaaaataaaactcttccctaaacgattagtagaaaaaatcattcgataataaataagaaagaaaaattagaaaaaaataacttcattttaaaaaaatcattaaggctatattttttaaatgactaattttatatagactgtaactaaaagtatacaatttattatgctatgtatcttaaagaattacttataaaaatctacggaagaatatcttacaaagtgaaaaacaaatgagaaagaatttagtgggatgattatgattttatttgaaaattgaaaaaataattattaaagactttagtggagtaagaaagctttcctattagtcttttcttatccataaaaaaaaaaaaaaaaatctagcgtgacagcttttccatagattttaataatgtaaaatactggtagcagccgaccgttcaggtaatggacactgtggtcctaacttgcaacgggtgcgggcccaatttaataacgccgtggtaacggataaagccaagcgtgaagcggtgaaggtacatctctgactccgtcaagattacgaaaccgtcaactacgaaggactccccgaaatatcatctgtgtcataaacaccaagtcacaccatacatgggcacgcgtcacaatatgattggagaacggttccaccgcatatgctataaaatgcccccacacccctcgaccctaatcgcacttcaattgcaatcaaattagttcattctctttgcgcagttccctacctctcctttcaaggttcgtagatttcttccgtttttttttcttcttctttattgtttgttctacatcagcatgatgttgatttgattgtgttttctatcgtttcatcgattataaattttcataatcagaagattcagcttttattaatgcaagaacgtccttaattgatgattttataaccgtaaattaggtctaattagagtttttttcataaagattttcagatccgtttacaacaagccttaattgttgattctgtagtcgtagattaaggtttttttcatgaactacttcagatccgttaaacaacagccttatttgttgatacttcagtcgtttttcaagaaattgttcagatccgttgataaaagccttattcgttgattctgtatggtatttcaagagatattgctcaggtcctttagcaactaccttatttgttgattctgtggccatagattaggattttttttcacgaaattgcttcttgaaattacgtgatggattttgattctgatttatcttgtgattgttgactctacagccatggcccacagcaagcacggcctgaaggaggagatgaccatgaagtaccacatggagggctgcgtgaacggccacaagttcgtgatcaccggcgagggcatcggctaccccttcaagggcaagcagaccatcaacctgtgcgtgatcgagggcggccccctgcccttcagcgaggacatcctgagcgccggcttcaagtacggcgaccggatcttcaccgagtacccccaggacatcgtggactacttcaagaacagctgccccgccggctacacctggggccggagcttcctgttcgaggacggcgccgtgtgcatctgtaacgtggacatcaccgtgagcgtgaaggagaactgcatctaccacaagagcatcttcaacggcgtgaacttccccgccgacggccccgtgatgaagaagatgaccaccaactgggaggccagctgcgagaagatcatgcccgtgcctaagcagggcatcctgaagggcgacgtgagcatgtacctgctgctgaaggacggcggccggtaccggtgccagttcgacaccgtgtacaaggccaagagcgtgcccagcaagatgcccgagtggcacttcatccagcacaagctgctgcgggaggaccggagcgacgccaagaaccagaagtggcagctgaccgagcacgccatcgccttccccagcgccctggcctgagagctcgaatttccccgatcgttcaaacatttggcaataaagtttcttaagattgaatcctgttgccggtcttgcgatgattatcatataatttctgttgaattacgttaagcatgtaataattaacatgtaatgcatgacgttatttatgagatgggtttttatgattagagtcccgcaattatacatttaatacgcgatagaaaacaaaatatagcgcgcaaactaggataaattatcgcgcgcggtgtcatctatgttactagatcgggaattctagtggccggcccagctgatatctagacccagctttcttgtacaaagtggccgttaacggatcggccagaatggcccggaccgggttaccgaattcgagctcggtaccctgggatccgatatcgatgggccctggccgaagcttggtcacccggtccgggcctagaaggccagcttcggccgccccgggcaactttattatacaaagttgatggtacggatccgtcgacggcgcgccgcggacctgaattccagcacactggcggccgttagtctaaaaacggcccctaactaacgcttagttgcccgctagattagtcccccgttagtgcctagttagacacacgacgaactaggggctactagtaacggccgccagtgtgctcggtacggccagaatggccatctggattcagcagggggtgattgcggttacatcatgtacggaaaaataattctaatccttgatttaaatttgaacttgactatttatttattctttatttcattttgtaaatcattttatgtatctcctggcaagcaattttatccaccttgcaccaacaccttcgggttccataatcaaaccaccttaacttcacaccatgctgtaactcacaccgcccagcatctccaatgtgaaagaagctaaaatttaataaacaatcatacgaagcagtgacaaaataccagatggtattaatgcttcgataaaattaattggaaagtataaaatggtagaaaataataaattataattaatttaagtaagataaaaaataattaaaaactaaaatgttaaaattttaaaaaaattattttaaataatatttaaaaacattaaaaatcattttaaaaaatttatttatagaacaattaaataaatatttcagctaataaaaaacaaaagcttacctagccttagaagacaacttgtccaacaattagatgatacccattgcccttacgttttctttaacatcaattattgtttttgtcaacaagctatcttttagttttattttattggtaaaaaatatgtcgccttcaagttgcatcatttaacacatctcgtcattagaaaaataaaactcttccctaaacgattagtagaaaaaatcattcgataataaataagaaagaaaaattagaaaaaaataacttcattttaaaaaaatcattaaggctatattttttaaatgactaattttatatagactgtaactaaaagtatacaatttattatgctatgtatcttaaagaattacttataaaaatctacggaagaatatcttacaaagtgaaaaacaaatgagaaagaatttagtgggatgattatgattttatttgaaaattgaaaaaataattattaaagactttagtggagtaagaaagctttcctattagtcttttcttatccataaaaaaaaaaaaaaaaatctagcgtgacagcttttccatagattttaataatgtaaaatactggtagcagccgaccgttcaggtaatggacactgtggtcctaacttgcaacgggtgcgggcccaatttaataacgccgtggtaacggataaagccaagcgtgaagcggtgaaggtacatctctgactccgtcaagattacgaaaccgtcaactacgaaggactccccgaaatatcatctgtgtcataaacaccaagtcacaccatacatgggcacgcgtcacaatatgattggagaacggttccaccgcatatgctataaaatgcccccacacccctcgaccctaatcgcacttcaattgcaatcaaattagttcattctctttgcgcagttccctacctctcctttcaaggttcgtagatttcttccgtttttttttcttcttctttattgtttgttctacatcagcatgatgttgatttgattgtgttttctatcgtttcatcgattataaattttcataatcagaagattcagcttttattaatgcaagaacgtccttaattgatgattttataaccgtaaattaggtctaattagagtttttttcataaagattttcagatccgtttacaacaagccttaattgttgattctgtagtcgtagattaaggtttttttcatgaactacttcagatccgttaaacaacagccttatttgttgatacttcagtcgtttttcaagaaattgttcagatccgttgataaaagccttattcgttgattctgtatggtatttcaagagatattgctcaggtcctttagcaactaccttatttgttgattctgtggccatagattaggattttttttcacgaaattgcttcttgaaattacgtgatggattttgattctgatttatcttgtgattgttgactctacagccatggctgcaactactcttacatctgctttacctggtgctttcagttcatcccagagaccaagtgctcctttcaacttacaaagatcacctagagtgcttagaaggttcaacagaaagacaggacgtcaacctcgtggacttgttcgtgctgcaaaggctcaagcggcgcaaaacctgccagagaaattcgatgaaacaagactctgggaggccctcaggggatttggggttagtccaagtagggttacttacgctcccgtcggattcggagattaccactggaccgtcacagatgaagacgggagaccttggttcgcaactgtcagtgacctcgaacacaaagagcattgcgggcagggagcacaagcagcccttaaaggactcagacaagctatggacactgccctcgcacttagagatagggacggactcagattcgtggttgctccagtggcagcaacagatgggggtggccctgtccttccccttgacgctaggtatgcactcacagtcttccctcacgtcccaggaagaacaggagagttcggacaaagactcacagaggcagagagggacagactgcttgctcttctggcagaactccacggaagaacacctcctgaaacaaccccaccagccgatatggaaccaccaggacttcctggtgttagagcagcactcgccgaaagtgaaggaccttggagtggaggaccatttgcagaacccgctagacttcttctcagagaacacgaggccacactgcacgcaagactcgctgaattcgaagccctcgtcgcaagagttaagggtcgtggagcacctcttgtcgttacccacggagaaccacacccaggcaacttgatcctcggagaggaaggctatctcctcgtggactgggatacagttggactggctccagctgaaagggatttgagtctcatctcagacgacccagctgacctcgcaagatacgcagagcttacaggaagaactccagacccagacgcactcgcactctatagactgcgttggagtctccttgatgtggctgagttcgtcgagtggttcagggctgaacaccaaagaacccaagacaccgagagtgcatggaaggggttcactgacacacttgggcaattggctgctggtggatcagctgcatagcaaacttatctctgttatgaatcagaagaagttcatgtctcgtttcatttaaaactttggtggtttgtgttttggggccttgtaaagcccctgatgaataattgttcaactatgtttccgttcctgtgttatacctttctttctaatgagtaatgacatcaaacttcttctgtattgaaattatgtccttgtgagtctctttatcatcgtttcgtctttacattatatgtgctacttttgtctaatgagcctgaaaagtggctccaatggtacgcactggaagatttgttggcttctggtagatatagcgacagtgttgagcttgtaatatcatgtctcttattgctaaattagttcctttcttaacagaaaccttcaaagtttttgtttttgttttcatttacctaatgtacacatacgctggccatgactaacaacatgtccaggcttagagcatatttttttctagcttaaattgttaacttgtcattcagtaaaatccgagaattgtgaagctctaattgaagctaattcgttttataaagtcagttaaaaagtatactaaattatccaacttttcttcaaaatctcaaaattctatgacaaaacgatagtctttgtttatgtcagtaccacaaagaggtggaaaaaaacaccaaaaaaacaataagcaaactatacactgagaagaaaaataaaagagagctcaatagatgttttatactaacggtagattagatcaaagatccaagctttactctacatagagcagaacccagaatcccttcatatctcttttattctagcaccgataatctactgaaaagaagacacttagagctctgtctctttgtcaaagaagtcccagccgtcatccagaagctccttacgttcattaacagaggccgcaattggatcgggtttacttattttgtgggtatctatacttttattagatttttaatcaggctcctgatttctttttatttcgattgaattcctgaacttgtattattcagtagatcgaataaattataaaaagataaaatcataaaataatattttatcctatcaatcatattaaagcaatgaatatgtaaaattaatcttatctttattttaaaaaatcatataggtttagtatttttttaaaaataaagataggattagttttactattcactgcttattacttttaaaaaaatcataaaggtttagtatttttttaaaataaatataggaatagttttactattcactgctttaatagaaaaatagtttaaaatttaagatagttttaatcccagcatttgccacgtttgaacgtgagccgaaacgatgtcgttacattatcttaacctagctgaaacgatgtcgtcataatatcgccaaatgccaactggactacgtcgaacccacaaatcccacaaagcgcgtgaaatcaaatcgctcaaaccacaaaaaagaacaacgcgtttgttacacgctcaatcccacgcgagtagagcacagtaaccttcaaataagcgaatggggcataatcagaaatccgaaataaacctaggggcattatcggaaatgaaaagtagctcactcaatataaaaatctaggaaccctagttttcgttatcactctgtgctccctcgctctatttctcagtctctgtgtttgcggctgaggattccgaacgagtgaccttcttcgtttctcgcaaaggtaacagcctctgctcttgtctcttcgattcgatctatgcctgtctcttatttacgatgatgtttcttcggttatgtttttttatttatgctttatgctgttgatgttcggttgtttgtttcgctttgtttttgtggttcagttttttaggattcttttggtttttgaatcgattaatcggaagagattttcgagttatttggtgtgttggaggtgaatcttttttttgaggtcatagatctgttgtatttgtgttataaacatgcgactttgtatgattttttacgaggttatgatgttctggttgttttattatgaatctgttgagacagaaccatgatttttgttgatgttcgtttacactattaaaggtttgttttaacaggattaaaagttttttaagcatgttgaaggagtcttgtagatatgtaaccgtcgatagtttttttgtgggtttgttcacatgttatcaagcttaatcttttactatgtatgcgaccatatctggatccagcaaaggcgattttttaattccttgtgaaacttttgtaatatgaagttgaaattttgttattggtaaactataaatgtgtgaagttggagtatacctttaccttcttatttggctttgtgatagtttaatttatatgtattttgagttctgacttgtatttctttgaattgattctagtttaagtaatcatggcctcctccgagaacgtcatcaccgagttcatgcgcttcaaggtgcgcatggagggcaccgtgaacggccacgagttcgagatcgagggcgagggcgagggccgcccctacgagggccacaacaccgtgaagctgaaggtgacgaagggcggccccctgcccttcgcctgggacatcctgtccccccagttccagtacggctccaaggtgtacgtgaagcaccccgccgacatccccgactacaagaagctgtccttccccgagggcttcaagtgggagcgcgtgatgaacttcgaggacggcggcgtggcgaccgtgacccaggactcctccctgcaggacggctgcttcatctacaaggtgaagttcatcggcgtgaacttcccctccgacggccccgtgatgcagaagaagaccatgggctgggaggcctccaccgagcgcctgtacccccgcgacggcgtgctgaagggcgagacccacaaggccctgaagctgaaggacggcggccactacctggtggagttcaagtccatctacatggccaagaagcccgtgcagctgcccggctactactacgtggacgccaagctggacatcacctcccacaacgaggactacaccatcgtggagcagtacgagcgcaccgagggccgccaccacctgttcctgtagttttgtgatctgatgataagtggttggttcgtgtctcatgcacttgggaggtgatctatttcacctggtgtagtttgtgtttccgtcagttggaaaaacttatccctatcgatttcgttttcattttctgcttttcttttatgtaccttcgtttgggcttgtaacgggcctttgtatttcaactctcaataataatccaagtgcatgttaaacaatttgtcatctgtttcggctttgatatactactggtgaagatgggccgtactactgcatcacaacgaaaaataataataagatgaaaaacttgaagtggaaaaaaaaaaaaacttgaatgttcactactactcattgaccataatgtttaacatacatagctcaatagtatttttgtgaatatggcaacacaaacagtccaaaacaattgtctcttactataccaaaccaagggcgccgcttgtttgccactctttgtgtgcaatagtgtgattaccacatctccacattcaatatattccctgaattatctgacgattttgatggctcactgttttcccaagtcttgaattgtcttctgtgcgccagtcaaatgcatatgtgttgagtttatcttttaaatatcaagcttttgtttttaacttttgtttgtaaccaaaaactcacagtaggagtttgatcacataattttatgtttgcctttgcaatttctagtgagtctttgattaaaagcttgaaaagaaaatgcagccaagcttaccaagtaagttatgtgtattaaccagaggaagagagaatcttgcaaaatttcaacaaacacaaaaagaagtattactacgattggtggagaaagaaaacgattccaaatcttgaactgttgttgtaaaagcatagcagaaagtgggagacaaccgaaatagaaatgactataacttaatttaatgttatcattataatttcttctagcaaatatttagaaagtaaatatcacatcaacctttaatgtaattaagctttctctttttgattcatgtgagatgaaaagaaaaaaaagaagagaaaagtgtagaaaacacatcatttctaagctgaagctgaggtacaaattaattaataagtgactagggtcacgtgaccctagtcacttatgattccgatgacttcgtaggttcctagctcaagccgctcgtgtccaagcgtcacttacgattagctaatgattacggcatctaggaccgactagttcttatgtgcttctagtctccaaatgtggttgatagttattttgctctaagatcaacagtaatgaagtataaatcatcgttgtggtgtgctactcggttaattgagcattaacacacacaaacatgacgaggatggtataatctccaaaaatgtgtactttgttaggtgggaccctatagccttgattaatgtgctatgttaggcatgcctggaaacgtgtgacgcatatgttttgtgaacctgttgatattatatgtgcttttatattaccatattttattaaaatactaatatttattactagtaagatataacattctatctagcttaaaaactaaccataaatattccataataactagatttaccaaactaatatactaaatatacataataaatacaaaattaacaagacaataatcaatatttatgagcttaatatatttagacattatggttggtcgacgataatcatgctaacttttcgtaattgcttgattgaaatatgcttagaataatgcctctttgttctacatggcaaatagggaccattatggtgtaacaccctgggaaccacaaacaccccgaaatgctactaaactacacaactaaccttcatatataaaatttcgacagcatctcctttgaaaatttgcatagacgtggaagcaacagagtataaacagatctagctagctaagtttaaacggccggccaaacgtgcaagcgctactagacaattcagtacattaaaaacgtccgcaatgtgttattaagttgtctaagcgtcaatttatttacaattgaatatatcctgcca

SEQ ID NO: 162 - DNA, 15202 bp, Artificial Sequence
  RV026529 T-DNA
caaacaaacatacacagcgatttattcacacgaacccgaattacaacggtatatatcctgtcagccaacaccaaaacatcaaaaaaatcgggatcaggatcaggatctgcggccgcatcctgcaggtttaaacggccggccttcactagctagctgctaagctcaaacgagcaggaagcaacgagagggtggcgcgcgaccgacgtgcgtacgtagcatgagcctgagtggagacgttggacgtgtatgtatatacctctctgcgtgttaactatgtacgtaagcggcaggcagtgcaataagtgtggctctgtagtatgtacgtgcgggtacgatgctgtaagctactgaggcaagtccataaataaataatgacacgtgcgtgttctataatctcttcgcttcttcatttgtccccttgcggagtttggcatccattgatgccgttacgctgagaacagacacagcagacgaaccaaaagtgagttcttgtatgaaactatgacccttcatcgctaggctcaaacagcaccccgtacgaacacagcaaattagtcatctaactattagcccctacatgtttcagacgatacataaatatagcccatccttagcaattagctattggccctgcccatcccaagcaatgatctcgaagtatttttaatatatagtatttttaatatgtagcttttaaaattagaagataattttgagacaaaaatctccaagtatttttttgggtattttttactgcctccgtttttctttatttctcgtcacctagtttaattttgtgctaatcggctataaacgaaacagagagaaaagttactctaaaagcaactccaacagattagatataaatcttatatcctgcctagagctgttaaaaagatagacaactttagtggattagtgtatgcaacaaactctccaaatttaagtatcccaactacccaacgcatatcgttcccttttcattggcgcacgaactttcacctgctatagccgacgtacatgttcgttttttttgggcggcgcttactttcttccccgttcgttctcagcatcgcaactcaatttgttatggcggagaagcccttgtatcccaggtagtaatgcacagatatgcattattattattcataaaatcgagctagttaccctatgaggtgacatgaagcgctcacggttactatgacggttagcttcacgactgttggtggcagtagcgtacgacttagctatagttccggacttacctaactgactagagtcacacttagctgaccctagtcacttaggcgcgccaagcttggatctcctgcaggatctggccggccggatgggcggatctcgtacctcaactttgtatagaaaagttgggccagaatggcccggaccgggttaccaagcggccgcgaattccagaagaccaaagggcaattgagacttttcaacaaagggtaatatcgggaaacctcctcggattccattgcccagctatctgtcacttcatcaaaaggacagtagaaaaggaaggtggcacctacaaatgccatcattgcgataaaggaaaggctatcgttcaagatgcctctgccgacagtggtcccaaagatggacccccacccacgaggagcatcgtggaaaaagaagacgttccaaccacgtcttcaaagcaagtggattgatgtgatatctccactgacgtaagggatgacgcacaatcccactatccttcgcaagacccttcctctatataaggaagttcatttcatttggagaggacccatggatcattctgataactgcccaggtaacaacaacaactctggttctggttctggttctggaaccaagtctggttacatgtgcagacaatctaactctagatggatcccaaccgctgaacaaatcagaatccttagagaactttactactctaacggtgttagatctccaaccgctgaacaaatccaaagaatctctgctagacttagacaatacggtaagatcgaaggtaagaacgttttttactggtttcaaaaccataaggctagagaaagacaaaagaagagacttaccgttgatcttgctgttcaaagagctgctgctacctctggtggtcttccaccaggtgttcttaacgtttctcatatcgctggttctacctgcggttctgttcttatggaatcttctcttatggattgctgctctacctctgctcttgaaaaccataacggtagaaaggaaagagctaacggtgatatgatcgttgaaagagaaagatctgctccaggtaaggaaacccttcaactttttccaatgcatcattctccacaaaacgatgataccatcgctgatgattacttttttaacgatgaagaagaaaagccagtttgcatggcttctcttgaacttacccttaactcttttgatagagtttaccatccagattctgattttagatctcattcttcttaaggtacctgacatcttatagtctgcaacctctcgtgtctgaattcctatctttatcaagtgttattgcttccacgactataggacagctttcgtcgaaaggttttgctcatgtgatctcgaaggattcatctagtctgatttttcgtgacttgtatcggttttattggattcatccaacatatatcaataaaaaatgagttgtgtttcctttcttcctagttcagttaaaattatttccctcctgcgcttgtgctgtaattgtctgtgtacctgttgtttgtgactgtgttagttcccttggatatgatttcgtatttgatatgtacatggagatagcttagcttcattattggagtatgaagttagtatgacatagtcactctcctggaaaattgacactgcaaaccatatttttattctgaaccacaaatcctagtcagtccgctggcatatgccgtccgtttgctgaatccagaacgtgggtttggagatgtacggctgagatgcctctatgcgaaggggatttcgtggtgaaacgagatgggagtagagcaacgcccgtggaagatgcttcaaacttccacacttttgagcaacgatcggcagtagtaaggtagacgatttcaagatcaaagcatatgaagataaacaacatcaacaacaaaatttgttggggttctatagagagaaacagagctacatacatacactgttttgtatctaccatctgagatgatgaaaagatgaaaaactaaagaatgccccggcgccaacgccaggacacgccgcgcgcgcgtcacccgagccatctcttgacccagccggcgctgtatatttacacacgttgcagcatcgatcaccacctgttcgatcgcgtcgccgtcaccaagcttggcgcgccggtcacccggtccgggcctagaaggccacccggggctcggcgttaggcttttagtccgctaggtggctagaccgaggttaggacgctagttcactaggggcctagtggtgttttaaggatgggcaagtttgtacaaaaaagcaggctggcgccggaaccaattcagtcgagtgcggccgccagtgtgatggatatctcgacccgggtgattgcggttacatcatgtacggaaaaataattctaatccttgatttaaatttgaacttgactatttatttattctttatttcattttgtaaatcattttatgtatctcctggcaagcaattttatccaccttgcaccaacaccttcgggttccataatcaaaccaccttaacttcacaccatgctgtaactcacaccgcccagcatctccaatgtgaaagaagctaaaatttaataaacaatcatacgaagcagtgacaaaataccagatggtattaatgcttcgataaaattaattggaaagtataaaatggtagaaaataataaattataattaatttaagtaagataaaaaataattaaaaactaaaatgttaaaattttaaaaaaattattttaaataatatttaaaaacattaaaaatcattttaaaaaatttatttatagaacaattaaataaatatttcagctaataaaaaacaaaagcttacctagccttagaagacaacttgtccaacaattagatgatacccattgcccttacgttttctttaacatcaattattgtttttgtcaacaagctatcttttagttttattttattggtaaaaaatatgtcgccttcaagttgcatcatttaacacatctcgtcattagaaaaataaaactcttccctaaacgattagtagaaaaaatcattcgataataaataagaaagaaaaattagaaaaaaataacttcattttaaaaaaatcattaaggctatattttttaaatgactaattttatatagactgtaactaaaagtatacaatttattatgctatgtatcttaaagaattacttataaaaatctacggaagaatatcttacaaagtgaaaaacaaatgagaaagaatttagtgggatgattatgattttatttgaaaattgaaaaaataattattaaagactttagtggagtaagaaagctttcctattagtcttttcttatccataaaaaaaaaaaaaaaaatctagcgtgacagcttttccatagattttaataatgtaaaatactggtagcagccgaccgttcaggtaatggacactgtggtcctaacttgcaacgggtgcgggcccaatttaataacgccgtggtaacggataaagccaagcgtgaagcggtgaaggtacatctctgactccgtcaagattacgaaaccgtcaactacgaaggactccccgaaatatcatctgtgtcataaacaccaagtcacaccatacatgggcacgcgtcacaatatgattggagaacggttccaccgcatatgctataaaatgcccccacacccctcgaccctaatcgcacttcaattgcaatcaaattagttcattctctttgcgcagttccctacctctcctttcaaggttcgtagatttcttccgtttttttttcttcttctttattgtttgttctacatcagcatgatgttgatttgattgtgttttctatcgtttcatcgattataaattttcataatcagaagattcagcttttattaatgcaagaacgtccttaattgatgattttataaccgtaaattaggtctaattagagtttttttcataaagattttcagatccgtttacaacaagccttaattgttgattctgtagtcgtagattaaggtttttttcatgaactacttcagatccgttaaacaacagccttatttgttgatacttcagtcgtttttcaagaaattgttcagatccgttgataaaagccttattcgttgattctgtatggtatttcaagagatattgctcaggtcctttagcaactaccttatttgttgattctgtggccatagattaggattttttttcacgaaattgcttcttgaaattacgtgatggattttgattctgatttatcttgtgattgttgactctacagccatggcccacagcaagcacggcctgaaggaggagatgaccatgaagtaccacatggagggctgcgtgaacggccacaagttcgtgatcaccggcgagggcatcggctaccccttcaagggcaagcagaccatcaacctgtgcgtgatcgagggcggccccctgcccttcagcgaggacatcctgagcgccggcttcaagtacggcgaccggatcttcaccgagtacccccaggacatcgtggactacttcaagaacagctgccccgccggctacacctggggccggagcttcctgttcgaggacggcgccgtgtgcatctgtaacgtggacatcaccgtgagcgtgaaggagaactgcatctaccacaagagcatcttcaacggcgtgaacttccccgccgacggccccgtgatgaagaagatgaccaccaactgggaggccagctgcgagaagatcatgcccgtgcctaagcagggcatcctgaagggcgacgtgagcatgtacctgctgctgaaggacggcggccggtaccggtgccagttcgacaccgtgtacaaggccaagagcgtgcccagcaagatgcccgagtggcacttcatccagcacaagctgctgcgggaggaccggagcgacgccaagaaccagaagtggcagctgaccgagcacgccatcgccttccccagcgccctggcctgagagctcgaatttccccgatcgttcaaacatttggcaataaagtttcttaagattgaatcctgttgccggtcttgcgatgattatcatataatttctgttgaattacgttaagcatgtaataattaacatgtaatgcatgacgttatttatgagatgggtttttatgattagagtcccgcaattatacatttaatacgcgatagaaaacaaaatatagcgcgcaaactaggataaattatcgcgcgcggtgtcatctatgttactagatcgggaattctagtggccggcccagctgatatctagacccagctttcttgtacaaagtggccgttaacggatcggccagaatggcccggaccgggttaccgaattcgagctcggtaccctgggatccgatatcgatgggccctggccgaagcttggtcacccggtccgggcctagaaggccagcttcggccgccccgggcaactttattatacaaagttgatggtacggatccgtcgacggcgcgccgcggacctgaattccagcacactggcggccgttagtctaaaaacggcccctaactaacgcttagttgcccgctagattagtcccccgttagtgcctagttagacacacgacgaactaggggctactagtaacggccgccagtgtgctcggtacggccagaatggccatctggattcagcagggggtgattgcggttacatcatgtacggaaaaataattctaatccttgatttaaatttgaacttgactatttatttattctttatttcattttgtaaatcattttatgtatctcctggcaagcaattttatccaccttgcaccaacaccttcgggttccataatcaaaccaccttaacttcacaccatgctgtaactcacaccgcccagcatctccaatgtgaaagaagctaaaatttaataaacaatcatacgaagcagtgacaaaataccagatggtattaatgcttcgataaaattaattggaaagtataaaatggtagaaaataataaattataattaatttaagtaagataaaaaataattaaaaactaaaatgttaaaattttaaaaaaattattttaaataatatttaaaaacattaaaaatcattttaaaaaatttatttatagaacaattaaataaatatttcagctaataaaaaacaaaagcttacctagccttagaagacaacttgtccaacaattagatgatacccattgcccttacgttttctttaacatcaattattgtttttgtcaacaagctatcttttagttttattttattggtaaaaaatatgtcgccttcaagttgcatcatttaacacatctcgtcattagaaaaataaaactcttccctaaacgattagtagaaaaaatcattcgataataaataagaaagaaaaattagaaaaaaataacttcattttaaaaaaatcattaaggctatattttttaaatgactaattttatatagactgtaactaaaagtatacaatttattatgctatgtatcttaaagaattacttataaaaatctacggaagaatatcttacaaagtgaaaaacaaatgagaaagaatttagtgggatgattatgattttatttgaaaattgaaaaaataattattaaagactttagtggagtaagaaagctttcctattagtcttttcttatccataaaaaaaaaaaaaaaaatctagcgtgacagcttttccatagattttaataatgtaaaatactggtagcagccgaccgttcaggtaatggacactgtggtcctaacttgcaacgggtgcgggcccaatttaataacgccgtggtaacggataaagccaagcgtgaagcggtgaaggtacatctctgactccgtcaagattacgaaaccgtcaactacgaaggactccccgaaatatcatctgtgtcataaacaccaagtcacaccatacatgggcacgcgtcacaatatgattggagaacggttccaccgcatatgctataaaatgcccccacacccctcgaccctaatcgcacttcaattgcaatcaaattagttcattctctttgcgcagttccctacctctcctttcaaggttcgtagatttcttccgtttttttttcttcttctttattgtttgttctacatcagcatgatgttgatttgattgtgttttctatcgtttcatcgattataaattttcataatcagaagattcagcttttattaatgcaagaacgtccttaattgatgattttataaccgtaaattaggtctaattagagtttttttcataaagattttcagatccgtttacaacaagccttaattgttgattctgtagtcgtagattaaggtttttttcatgaactacttcagatccgttaaacaacagccttatttgttgatacttcagtcgtttttcaagaaattgttcagatccgttgataaaagccttattcgttgattctgtatggtatttcaagagatattgctcaggtcctttagcaactaccttatttgttgattctgtggccatagattaggattttttttcacgaaattgcttcttgaaattacgtgatggattttgattctgatttatcttgtgattgttgactctacagccatggctgcaactactcttacatctgctttacctggtgctttcagttcatcccagagaccaagtgctcctttcaacttacaaagatcacctagagtgcttagaaggttcaacagaaagacaggacgtcaacctcgtggacttgttcgtgctgcaaaggctcaagcggcgcaaaacctgccagagaaattcgatgaaacaagactctgggaggccctcaggggatttggggttagtccaagtagggttacttacgctcccgtcggattcggagattaccactggaccgtcacagatgaagacgggagaccttggttcgcaactgtcagtgacctcgaacacaaagagcattgcgggcagggagcacaagcagcccttaaaggactcagacaagctatggacactgccctcgcacttagagatagggacggactcagattcgtggttgctccagtggcagcaacagatgggggtggccctgtccttccccttgacgctaggtatgcactcacagtcttccctcacgtcccaggaagaacaggagagttcggacaaagactcacagaggcagagagggacagactgcttgctcttctggcagaactccacggaagaacacctcctgaaacaaccccaccagccgatatggaaccaccaggacttcctggtgttagagcagcactcgccgaaagtgaaggaccttggagtggaggaccatttgcagaacccgctagacttcttctcagagaacacgaggccacactgcacgcaagactcgctgaattcgaagccctcgtcgcaagagttaagggtcgtggagcacctcttgtcgttacccacggagaaccacacccaggcaacttgatcctcggagaggaaggctatctcctcgtggactgggatacagttggactggctccagctgaaagggatttgagtctcatctcagacgacccagctgacctcgcaagatacgcagagcttacaggaagaactccagacccagacgcactcgcactctatagactgcgttggagtctccttgatgtggctgagttcgtcgagtggttcagggctgaacaccaaagaacccaagacaccgagagtgcatggaaggggttcactgacacacttgggcaattggctgctggtggatcagctgcatagcaaacttatctctgttatgaatcagaagaagttcatgtctcgtttcatttaaaactttggtggtttgtgttttggggccttgtaaagcccctgatgaataattgttcaactatgtttccgttcctgtgttatacctttctttctaatgagtaatgacatcaaacttcttctgtattgaaattatgtccttgtgagtctctttatcatcgtttcgtctttacattatatgtgctacttttgtctaatgagcctgaaaagtggctccaatggtacgcactggaagatttgttggcttctggtagatatagcgacagtgttgagcttgtaatatcatgtctcttattgctaaattagttcctttcttaacagaaaccttcaaagtttttgtttttgttttcatttacctaatgtacacatacgctggccatgactaacaacatgtccaggcttagagcatatttttttctagcttaaattgttaacttgtcattcagtaaaatccgagaattgtgaagctctaattgaagctaattcgttttataaagtcagttaaaaagtatactaaattatccaacttttcttcaaaatctcaaaattctatgacaaaacgatagtctttgtttatgtcagtaccacaaagaggtggaaaaaaacaccaaaaaaacaataagcaaactatacactgagaagaaaaataaaagagagctcaatagatgttttatactaacggtagattagatcaaagatccaagctttactctacatagagcagaacccagaatcccttcatatctcttttattctagcaccgataatctactgaaaagaagacacttagagctctgtctctttgtcaaagaagtcccagccgtcatccagaagctccttacgttcattaacagaggccgcaattggatcgggtttacttattttgtgggtatctatacttttattagatttttaatcaggctcctgatttctttttatttcgattgaattcctgaacttgtattattcagtagatcgaataaattataaaaagataaaatcataaaataatattttatcctatcaatcatattaaagcaatgaatatgtaaaattaatcttatctttattttaaaaaatcatataggtttagtatttttttaaaaataaagataggattagttttactattcactgcttattacttttaaaaaaatcataaaggtttagtatttttttaaaataaatataggaatagttttactattcactgctttaatagaaaaatagtttaaaatttaagatagttttaatcccagcatttgccacgtttgaacgtgagccgaaacgatgtcgttacattatcttaacctagctgaaacgatgtcgtcataatatcgccaaatgccaactggactacgtcgaacccacaaatcccacaaagcgcgtgaaatcaaatcgctcaaaccacaaaaaagaacaacgcgtttgttacacgctcaatcccacgcgagtagagcacagtaaccttcaaataagcgaatggggcataatcagaaatccgaaataaacctaggggcattatcggaaatgaaaagtagctcactcaatataaaaatctaggaaccctagttttcgttatcactctgtgctccctcgctctatttctcagtctctgtgtttgcggctgaggattccgaacgagtgaccttcttcgtttctcgcaaaggtaacagcctctgctcttgtctcttcgattcgatctatgcctgtctcttatttacgatgatgtttcttcggttatgtttttttatttatgctttatgctgttgatgttcggttgtttgtttcgctttgtttttgtggttcagttttttaggattcttttggtttttgaatcgattaatcggaagagattttcgagttatttggtgtgttggaggtgaatcttttttttgaggtcatagatctgttgtatttgtgttataaacatgcgactttgtatgattttttacgaggttatgatgttctggttgttttattatgaatctgttgagacagaaccatgatttttgttgatgttcgtttacactattaaaggtttgttttaacaggattaaaagttttttaagcatgttgaaggagtcttgtagatatgtaaccgtcgatagtttttttgtgggtttgttcacatgttatcaagcttaatcttttactatgtatgcgaccatatctggatccagcaaaggcgattttttaattccttgtgaaacttttgtaatatgaagttgaaattttgttattggtaaactataaatgtgtgaagttggagtatacctttaccttcttatttggctttgtgatagtttaatttatatgtattttgagttctgacttgtatttctttgaattgattctagtttaagtaatcatggcctcctccgagaacgtcatcaccgagttcatgcgcttcaaggtgcgcatggagggcaccgtgaacggccacgagttcgagatcgagggcgagggcgagggccgcccctacgagggccacaacaccgtgaagctgaaggtgacgaagggcggccccctgcccttcgcctgggacatcctgtccccccagttccagtacggctccaaggtgtacgtgaagcaccccgccgacatccccgactacaagaagctgtccttccccgagggcttcaagtgggagcgcgtgatgaacttcgaggacggcggcgtggcgaccgtgacccaggactcctccctgcaggacggctgcttcatctacaaggtgaagttcatcggcgtgaacttcccctccgacggccccgtgatgcagaagaagaccatgggctgggaggcctccaccgagcgcctgtacccccgcgacggcgtgctgaagggcgagacccacaaggccctgaagctgaaggacggcggccactacctggtggagttcaagtccatctacatggccaagaagcccgtgcagctgcccggctactactacgtggacgccaagctggacatcacctcccacaacgaggactacaccatcgtggagcagtacgagcgcaccgagggccgccaccacctgttcctgtagttttgtgatctgatgataagtggttggttcgtgtctcatgcacttgggaggtgatctatttcacctggtgtagtttgtgtttccgtcagttggaaaaacttatccctatcgatttcgttttcattttctgcttttcttttatgtaccttcgtttgggcttgtaacgggcctttgtatttcaactctcaataataatccaagtgcatgttaaacaatttgtcatctgtttcggctttgatatactactggtgaagatgggccgtactactgcatcacaacgaaaaataataataagatgaaaaacttgaagtggaaaaaaaaaaaaacttgaatgttcactactactcattgaccataatgtttaacatacatagctcaatagtatttttgtgaatatggcaacacaaacagtccaaaacaattgtctcttactataccaaaccaagggcgccgcttgtttgccactctttgtgtgcaatagtgtgattaccacatctccacattcaatatattccctgaattatctgacgattttgatggctcactgttttcccaagtcttgaattgtcttctgtgcgccagtcaaatgcatatgtgttgagtttatcttttaaatatcaagcttttgtttttaacttttgtttgtaaccaaaaactcacagtaggagtttgatcacataattttatgtttgcctttgcaatttctagtgagtctttgattaaaagcttgaaaagaaaatgcagccaagcttaccaagtaagttatgtgtattaaccagaggaagagagaatcttgcaaaatttcaacaaacacaaaaagaagtattactacgattggtggagaaagaaaacgattccaaatcttgaactgttgttgtaaaagcatagcagaaagtgggagacaaccgaaatagaaatgactataacttaatttaatgttatcattataatttcttctagcaaatatttagaaagtaaatatcacatcaacctttaatgtaattaagctttctctttttgattcatgtgagatgaaaagaaaaaaaagaagagaaaagtgtagaaaacacatcatttctaagctgaagctgaggtacaaattaattaataagtgactagggtcacgtgaccctagtcacttatgattccgatgacttcgtaggttcctagctcaagccgctcgtgtccaagcgtcacttacgattagctaatgattacggcatctaggaccgactagttcttatgtgcttctagtctccaaatgtggttgatagttattttgctctaagatcaacagtaatgaagtataaatcatcgttgtggtgtgctactcggttaattgagcattaacacacacaaacatgacgaggatggtataatctccaaaaatgtgtactttgttaggtgggaccctatagccttgattaatgtgctatgttaggcatgcctggaaacgtgtgacgcatatgttttgtgaacctgttgatattatatgtgcttttatattaccatattttattaaaatactaatatttattactagtaagatataacattctatctagcttaaaaactaaccataaatattccataataactagatttaccaaactaatatactaaatatacataataaatacaaaattaacaagacaataatcaatatttatgagcttaatatatttagacattatggttggtcgacgataatcatgctaacttttcgtaattgcttgattgaaatatgcttagaataatgcctctttgttctacatggcaaatagggaccattatggtgtaacaccctgggaaccacaaacaccccgaaatgctactaaactacacaactaaccttcatatataaaatttcgacagcatctcctttgaaaatttgcatagacgtggaagcaacagagtataaacagatctagctagctaagtttaaacggccggccaaacgtgcaagcgctactagacaattcagtacattaaaaacgtccgcaatgtgttattaagttgtctaagcgtcaatttatttacaattgaatatatcctgcca

SEQ ID NO: 163 - DNA, 15343 bp, Artificial Sequence
  RV026528 T-DNA
caaacaaacatacacagcgatttattcacacgaacccgaattacaacggtatatatcctgtcagccaacaccaaaacatcaaaaaaatcgggatcaggatcaggatctgcggccgcatcctgcaggtttaaacggccggccttcactagctagctgctaagctcaaacgagcaggaagcaacgagagggtggcgcgcgaccgacgtgcgtacgtagcatgagcctgagtggagacgttggacgtgtatgtatatacctctctgcgtgttaactatgtacgtaagcggcaggcagtgcaataagtgtggctctgtagtatgtacgtgcgggtacgatgctgtaagctactgaggcaagtccataaataaataatgacacgtgcgtgttctataatctcttcgcttcttcatttgtccccttgcggagtttggcatccattgatgccgttacgctgagaacagacacagcagacgaaccaaaagtgagttcttgtatgaaactatgacccttcatcgctaggctcaaacagcaccccgtacgaacacagcaaattagtcatctaactattagcccctacatgtttcagacgatacataaatatagcccatccttagcaattagctattggccctgcccatcccaagcaatgatctcgaagtatttttaatatatagtatttttaatatgtagcttttaaaattagaagataattttgagacaaaaatctccaagtatttttttgggtattttttactgcctccgtttttctttatttctcgtcacctagtttaattttgtgctaatcggctataaacgaaacagagagaaaagttactctaaaagcaactccaacagattagatataaatcttatatcctgcctagagctgttaaaaagatagacaactttagtggattagtgtatgcaacaaactctccaaatttaagtatcccaactacccaacgcatatcgttcccttttcattggcgcacgaactttcacctgctatagccgacgtacatgttcgttttttttgggcggcgcttactttcttccccgttcgttctcagcatcgcaactcaatttgttatggcggagaagcccttgtatcccaggtagtaatgcacagatatgcattattattattcataaaatcgagctagttaccctatgaggtgacatgaagcgctcacggttactatgacggttagcttcacgactgttggtggcagtagcgtacgacttagctatagttccggacttacctaactgactagagtcacacttagctgaccctagtcacttaggcgcgccaagcttggatctcctgcaggatctggccggccggatgggcggatctcgtacctcaactttgtatagaaaagttgggccagaatggcccggaccgggttaccaagcggccgcgaattccagaagaccaaagggcaattgagacttttcaacaaagggtaatatcgggaaacctcctcggattccattgcccagctatctgtcacttcatcaaaaggacagtagaaaaggaaggtggcacctacaaatgccatcattgcgataaaggaaaggctatcgttcaagatgcctctgccgacagtggtcccaaagatggacccccacccacgaggagcatcgtggaaaaagaagacgttccaaccacgtcttcaaagcaagtggattgatgtgatatctccactgacgtaagggatgacgcacaatcccactatccttcgcaagacccttcctctatataaggaagttcatttcatttggagaggacccatggaacctcaacaagatcccaataaccaacaacaacaacttcaacaacaacaacatgaagaaaacagcagtggaagtagtagcaaaagcagttttctttgcaggcaaactagtacaaggtggacacccacaagtgatcagataagaatcttgaaagacctttactacaacaatggagttaggtctccaagtgcagagcaaatacagagaatctcagcaaggttaaggcagtacggtaagattgaaggcaagaatgttttctattggtttcagaaccacaaagctcgtgagagacaaaagaagagattcacaaatgatacaacaaccatgtccatgcaaagagctactactgcaactggtcatgccaaatacattactacttctcctgggatttcatctccatcttctgctggtgtacttggtgttggacagatgggaagcaacatgggatatggatctgttgttatggagaagagttttagagactgttcaatatctcctgctgctggtggtggtggtggtggtggcagtaatatgggtggatatggatccatgaacaacaattttggttggattggtgcgggtgtcgagccatatccatttttcaacaagacaaagcatattcaaaaatatgaagaagaagatttctcccaaactgagattgaaacactaccactatttcccatgcatggtgaagacagtacaaggtttggttcatctggcaacccaaacccgaattggaactggtttcgaacaggagatgaaatgattggatctagaacatcattggagcttagcttgaattcttactctggcgggtcaattaataactgaggtacctgacatcttatagtctgcaacctctcgtgtctgaattcctatctttatcaagtgttattgcttccacgactataggacagctttcgtcgaaaggttttgctcatgtgatctcgaaggattcatctagtctgatttttcgtgacttgtatcggttttattggattcatccaacatatatcaataaaaaatgagttgtgtttcctttcttcctagttcagttaaaattatttccctcctgcgcttgtgctgtaattgtctgtgtacctgttgtttgtgactgtgttagttcccttggatatgatttcgtatttgatatgtacatggagatagcttagcttcattattggagtatgaagttagtatgacatagtcactctcctggaaaattgacactgcaaaccatatttttattctgaaccacaaatcctagtcagtccgctggcatatgccgtccgtttgctgaatccagaacgtgggtttggagatgtacggctgagatgcctctatgcgaaggggatttcgtggtgaaacgagatgggagtagagcaacgcccgtggaagatgcttcaaacttccacacttttgagcaacgatcggcagtagtaaggtagacgatttcaagatcaaagcatatgaagataaacaacatcaacaacaaaatttgttggggttctatagagagaaacagagctacatacatacactgttttgtatctaccatctgagatgatgaaaagatgaaaaactaaagaatgccccggcgccaacgccaggacacgccgcgcgcgcgtcacccgagccatctcttgacccagccggcgctgtatatttacacacgttgcagcatcgatcaccacctgttcgatcgcgtcgccgtcaccaagcttggcgcgccggtcacccggtccgggcctagaaggccacccggggctcggcgttaggcttttagtccgctaggtggctagaccgaggttaggacgctagttcactaggggcctagtggtgttttaaggatgggcaagtttgtacaaaaaagcaggctggcgccggaaccaattcagtcgagtgcggccgccagtgtgatggatatctcgacccgggtgattgcggttacatcatgtacggaaaaataattctaatccttgatttaaatttgaacttgactatttatttattctttatttcattttgtaaatcattttatgtatctcctggcaagcaattttatccaccttgcaccaacaccttcgggttccataatcaaaccaccttaacttcacaccatgctgtaactcacaccgcccagcatctccaatgtgaaagaagctaaaatttaataaacaatcatacgaagcagtgacaaaataccagatggtattaatgcttcgataaaattaattggaaagtataaaatggtagaaaataataaattataattaatttaagtaagataaaaaataattaaaaactaaaatgttaaaattttaaaaaaattattttaaataatatttaaaaacattaaaaatcattttaaaaaatttatttatagaacaattaaataaatatttcagctaataaaaaacaaaagcttacctagccttagaagacaacttgtccaacaattagatgatacccattgcccttacgttttctttaacatcaattattgtttttgtcaacaagctatcttttagttttattttattggtaaaaaatatgtcgccttcaagttgcatcatttaacacatctcgtcattagaaaaataaaactcttccctaaacgattagtagaaaaaatcattcgataataaataagaaagaaaaattagaaaaaaataacttcattttaaaaaaatcattaaggctatattttttaaatgactaattttatatagactgtaactaaaagtatacaatttattatgctatgtatcttaaagaattacttataaaaatctacggaagaatatcttacaaagtgaaaaacaaatgagaaagaatttagtgggatgattatgattttatttgaaaattgaaaaaataattattaaagactttagtggagtaagaaagctttcctattagtcttttcttatccataaaaaaaaaaaaaaaaatctagcgtgacagcttttccatagattttaataatgtaaaatactggtagcagccgaccgttcaggtaatggacactgtggtcctaacttgcaacgggtgcgggcccaatttaataacgccgtggtaacggataaagccaagcgtgaagcggtgaaggtacatctctgactccgtcaagattacgaaaccgtcaactacgaaggactccccgaaatatcatctgtgtcataaacaccaagtcacaccatacatgggcacgcgtcacaatatgattggagaacggttccaccgcatatgctataaaatgcccccacacccctcgaccctaatcgcacttcaattgcaatcaaattagttcattctctttgcgcagttccctacctctcctttcaaggttcgtagatttcttccgtttttttttcttcttctttattgtttgttctacatcagcatgatgttgatttgattgtgttttctatcgtttcatcgattataaattttcataatcagaagattcagcttttattaatgcaagaacgtccttaattgatgattttataaccgtaaattaggtctaattagagtttttttcataaagattttcagatccgtttacaacaagccttaattgttgattctgtagtcgtagattaaggtttttttcatgaactacttcagatccgttaaacaacagccttatttgttgatacttcagtcgtttttcaagaaattgttcagatccgttgataaaagccttattcgttgattctgtatggtatttcaagagatattgctcaggtcctttagcaactaccttatttgttgattctgtggccatagattaggattttttttcacgaaattgcttcttgaaattacgtgatggattttgattctgatttatcttgtgattgttgactctacagccatggcccacagcaagcacggcctgaaggaggagatgaccatgaagtaccacatggagggctgcgtgaacggccacaagttcgtgatcaccggcgagggcatcggctaccccttcaagggcaagcagaccatcaacctgtgcgtgatcgagggcggccccctgcccttcagcgaggacatcctgagcgccggcttcaagtacggcgaccggatcttcaccgagtacccccaggacatcgtggactacttcaagaacagctgccccgccggctacacctggggccggagcttcctgttcgaggacggcgccgtgtgcatctgtaacgtggacatcaccgtgagcgtgaaggagaactgcatctaccacaagagcatcttcaacggcgtgaacttccccgccgacggccccgtgatgaagaagatgaccaccaactgggaggccagctgcgagaagatcatgcccgtgcctaagcagggcatcctgaagggcgacgtgagcatgtacctgctgctgaaggacggcggccggtaccggtgccagttcgacaccgtgtacaaggccaagagcgtgcccagcaagatgcccgagtggcacttcatccagcacaagctgctgcgggaggaccggagcgacgccaagaaccagaagtggcagctgaccgagcacgccatcgccttccccagcgccctggcctgagagctcgaatttccccgatcgttcaaacatttggcaataaagtttcttaagattgaatcctgttgccggtcttgcgatgattatcatataatttctgttgaattacgttaagcatgtaataattaacatgtaatgcatgacgttatttatgagatgggtttttatgattagagtcccgcaattatacatttaatacgcgatagaaaacaaaatatagcgcgcaaactaggataaattatcgcgcgcggtgtcatctatgttactagatcgggaattctagtggccggcccagctgatatctagacccagctttcttgtacaaagtggccgttaacggatcggccagaatggcccggaccgggttaccgaattcgagctcggtaccctgggatccgatatcgatgggccctggccgaagcttggtcacccggtccgggcctagaaggccagcttcggccgccccgggcaactttattatacaaagttgatggtacggatccgtcgacggcgcgccgcggacctgaattccagcacactggcggccgttagtctaaaaacggcccctaactaacgcttagttgcccgctagattagtcccccgttagtgcctagttagacacacgacgaactaggggctactagtaacggccgccagtgtgctcggtacggccagaatggccatctggattcagcagggggtgattgcggttacatcatgtacggaaaaataattctaatccttgatttaaatttgaacttgactatttatttattctttatttcattttgtaaatcattttatgtatctcctggcaagcaattttatccaccttgcaccaacaccttcgggttccataatcaaaccaccttaacttcacaccatgctgtaactcacaccgcccagcatctccaatgtgaaagaagctaaaatttaataaacaatcatacgaagcagtgacaaaataccagatggtattaatgcttcgataaaattaattggaaagtataaaatggtagaaaataataaattataattaatttaagtaagataaaaaataattaaaaactaaaatgttaaaattttaaaaaaattattttaaataatatttaaaaacattaaaaatcattttaaaaaatttatttatagaacaattaaataaatatttcagctaataaaaaacaaaagcttacctagccttagaagacaacttgtccaacaattagatgatacccattgcccttacgttttctttaacatcaattattgtttttgtcaacaagctatcttttagttttattttattggtaaaaaatatgtcgccttcaagttgcatcatttaacacatctcgtcattagaaaaataaaactcttccctaaacgattagtagaaaaaatcattcgataataaataagaaagaaaaattagaaaaaaataacttcattttaaaaaaatcattaaggctatattttttaaatgactaattttatatagactgtaactaaaagtatacaatttattatgctatgtatcttaaagaattacttataaaaatctacggaagaatatcttacaaagtgaaaaacaaatgagaaagaatttagtgggatgattatgattttatttgaaaattgaaaaaataattattaaagactttagtggagtaagaaagctttcctattagtcttttcttatccataaaaaaaaaaaaaaaaatctagcgtgacagcttttccatagattttaataatgtaaaatactggtagcagccgaccgttcaggtaatggacactgtggtcctaacttgcaacgggtgcgggcccaatttaataacgccgtggtaacggataaagccaagcgtgaagcggtgaaggtacatctctgactccgtcaagattacgaaaccgtcaactacgaaggactccccgaaatatcatctgtgtcataaacaccaagtcacaccatacatgggcacgcgtcacaatatgattggagaacggttccaccgcatatgctataaaatgcccccacacccctcgaccctaatcgcacttcaattgcaatcaaattagttcattctctttgcgcagttccctacctctcctttcaaggttcgtagatttcttccgtttttttttcttcttctttattgtttgttctacatcagcatgatgttgatttgattgtgttttctatcgtttcatcgattataaattttcataatcagaagattcagcttttattaatgcaagaacgtccttaattgatgattttataaccgtaaattaggtctaattagagtttttttcataaagattttcagatccgtttacaacaagccttaattgttgattctgtagtcgtagattaaggtttttttcatgaactacttcagatccgttaaacaacagccttatttgttgatacttcagtcgtttttcaagaaattgttcagatccgttgataaaagccttattcgttgattctgtatggtatttcaagagatattgctcaggtcctttagcaactaccttatttgttgattctgtggccatagattaggattttttttcacgaaattgcttcttgaaattacgtgatggattttgattctgatttatcttgtgattgttgactctacagccatggctgcaactactcttacatctgctttacctggtgctttcagttcatcccagagaccaagtgctcctttcaacttacaaagatcacctagagtgcttagaaggttcaacagaaagacaggacgtcaacctcgtggacttgttcgtgctgcaaaggctcaagcggcgcaaaacctgccagagaaattcgatgaaacaagactctgggaggccctcaggggatttggggttagtccaagtagggttacttacgctcccgtcggattcggagattaccactggaccgtcacagatgaagacgggagaccttggttcgcaactgtcagtgacctcgaacacaaagagcattgcgggcagggagcacaagcagcccttaaaggactcagacaagctatggacactgccctcgcacttagagatagggacggactcagattcgtggttgctccagtggcagcaacagatgggggtggccctgtccttccccttgacgctaggtatgcactcacagtcttccctcacgtcccaggaagaacaggagagttcggacaaagactcacagaggcagagagggacagactgcttgctcttctggcagaactccacggaagaacacctcctgaaacaaccccaccagccgatatggaaccaccaggacttcctggtgttagagcagcactcgccgaaagtgaaggaccttggagtggaggaccatttgcagaacccgctagacttcttctcagagaacacgaggccacactgcacgcaagactcgctgaattcgaagccctcgtcgcaagagttaagggtcgtggagcacctcttgtcgttacccacggagaaccacacccaggcaacttgatcctcggagaggaaggctatctcctcgtggactgggatacagttggactggctccagctgaaagggatttgagtctcatctcagacgacccagctgacctcgcaagatacgcagagcttacaggaagaactccagacccagacgcactcgcactctatagactgcgttggagtctccttgatgtggctgagttcgtcgagtggttcagggctgaacaccaaagaacccaagacaccgagagtgcatggaaggggttcactgacacacttgggcaattggctgctggtggatcagctgcatagcaaacttatctctgttatgaatcagaagaagttcatgtctcgtttcatttaaaactttggtggtttgtgttttggggccttgtaaagcccctgatgaataattgttcaactatgtttccgttcctgtgttatacctttctttctaatgagtaatgacatcaaacttcttctgtattgaaattatgtccttgtgagtctctttatcatcgtttcgtctttacattatatgtgctacttttgtctaatgagcctgaaaagtggctccaatggtacgcactggaagatttgttggcttctggtagatatagcgacagtgttgagcttgtaatatcatgtctcttattgctaaattagttcctttcttaacagaaaccttcaaagtttttgtttttgttttcatttacctaatgtacacatacgctggccatgactaacaacatgtccaggcttagagcatatttttttctagcttaaattgttaacttgtcattcagtaaaatccgagaattgtgaagctctaattgaagctaattcgttttataaagtcagttaaaaagtatactaaattatccaacttttcttcaaaatctcaaaattctatgacaaaacgatagtctttgtttatgtcagtaccacaaagaggtggaaaaaaacaccaaaaaaacaataagcaaactatacactgagaagaaaaataaaagagagctcaatagatgttttatactaacggtagattagatcaaagatccaagctttactctacatagagcagaacccagaatcccttcatatctcttttattctagcaccgataatctactgaaaagaagacacttagagctctgtctctttgtcaaagaagtcccagccgtcatccagaagctccttacgttcattaacagaggccgcaattggatcgggtttacttattttgtgggtatctatacttttattagatttttaatcaggctcctgatttctttttatttcgattgaattcctgaacttgtattattcagtagatcgaataaattataaaaagataaaatcataaaataatattttatcctatcaatcatattaaagcaatgaatatgtaaaattaatcttatctttattttaaaaaatcatataggtttagtatttttttaaaaataaagataggattagttttactattcactgcttattacttttaaaaaaatcataaaggtttagtatttttttaaaataaatataggaatagttttactattcactgctttaatagaaaaatagtttaaaatttaagatagttttaatcccagcatttgccacgtttgaacgtgagccgaaacgatgtcgttacattatcttaacctagctgaaacgatgtcgtcataatatcgccaaatgccaactggactacgtcgaacccacaaatcccacaaagcgcgtgaaatcaaatcgctcaaaccacaaaaaagaacaacgcgtttgttacacgctcaatcccacgcgagtagagcacagtaaccttcaaataagcgaatggggcataatcagaaatccgaaataaacctaggggcattatcggaaatgaaaagtagctcactcaatataaaaatctaggaaccctagttttcgttatcactctgtgctccctcgctctatttctcagtctctgtgtttgcggctgaggattccgaacgagtgaccttcttcgtttctcgcaaaggtaacagcctctgctcttgtctcttcgattcgatctatgcctgtctcttatttacgatgatgtttcttcggttatgtttttttatttatgctttatgctgttgatgttcggttgtttgtttcgctttgtttttgtggttcagttttttaggattcttttggtttttgaatcgattaatcggaagagattttcgagttatttggtgtgttggaggtgaatcttttttttgaggtcatagatctgttgtatttgtgttataaacatgcgactttgtatgattttttacgaggttatgatgttctggttgttttattatgaatctgttgagacagaaccatgatttttgttgatgttcgtttacactattaaaggtttgttttaacaggattaaaagttttttaagcatgttgaaggagtcttgtagatatgtaaccgtcgatagtttttttgtgggtttgttcacatgttatcaagcttaatcttttactatgtatgcgaccatatctggatccagcaaaggcgattttttaattccttgtgaaacttttgtaatatgaagttgaaattttgttattggtaaactataaatgtgtgaagttggagtatacctttaccttcttatttggctttgtgatagtttaatttatatgtattttgagttctgacttgtatttctttgaattgattctagtttaagtaatcatggcctcctccgagaacgtcatcaccgagttcatgcgcttcaaggtgcgcatggagggcaccgtgaacggccacgagttcgagatcgagggcgagggcgagggccgcccctacgagggccacaacaccgtgaagctgaaggtgacgaagggcggccccctgcccttcgcctgggacatcctgtccccccagttccagtacggctccaaggtgtacgtgaagcaccccgccgacatccccgactacaagaagctgtccttccccgagggcttcaagtgggagcgcgtgatgaacttcgaggacggcggcgtggcgaccgtgacccaggactcctccctgcaggacggctgcttcatctacaaggtgaagttcatcggcgtgaacttcccctccgacggccccgtgatgcagaagaagaccatgggctgggaggcctccaccgagcgcctgtacccccgcgacggcgtgctgaagggcgagacccacaaggccctgaagctgaaggacggcggccactacctggtggagttcaagtccatctacatggccaagaagcccgtgcagctgcccggctactactacgtggacgccaagctggacatcacctcccacaacgaggactacaccatcgtggagcagtacgagcgcaccgagggccgccaccacctgttcctgtagttttgtgatctgatgataagtggttggttcgtgtctcatgcacttgggaggtgatctatttcacctggtgtagtttgtgtttccgtcagttggaaaaacttatccctatcgatttcgttttcattttctgcttttcttttatgtaccttcgtttgggcttgtaacgggcctttgtatttcaactctcaataataatccaagtgcatgttaaacaatttgtcatctgtttcggctttgatatactactggtgaagatgggccgtactactgcatcacaacgaaaaataataataagatgaaaaacttgaagtggaaaaaaaaaaaaacttgaatgttcactactactcattgaccataatgtttaacatacatagctcaatagtatttttgtgaatatggcaacacaaacagtccaaaacaattgtctcttactataccaaaccaagggcgccgcttgtttgccactctttgtgtgcaatagtgtgattaccacatctccacattcaatatattccctgaattatctgacgattttgatggctcactgttttcccaagtcttgaattgtcttctgtgcgccagtcaaatgcatatgtgttgagtttatcttttaaatatcaagcttttgtttttaacttttgtttgtaaccaaaaactcacagtaggagtttgatcacataattttatgtttgcctttgcaatttctagtgagtctttgattaaaagcttgaaaagaaaatgcagccaagcttaccaagtaagttatgtgtattaaccagaggaagagagaatcttgcaaaatttcaacaaacacaaaaagaagtattactacgattggtggagaaagaaaacgattccaaatcttgaactgttgttgtaaaagcatagcagaaagtgggagacaaccgaaatagaaatgactataacttaatttaatgttatcattataatttcttctagcaaatatttagaaagtaaatatcacatcaacctttaatgtaattaagctttctctttttgattcatgtgagatgaaaagaaaaaaaagaagagaaaagtgtagaaaacacatcatttctaagctgaagctgaggtacaaattaattaataagtgactagggtcacgtgaccctagtcacttatgattccgatgacttcgtaggttcctagctcaagccgctcgtgtccaagcgtcacttacgattagctaatgattacggcatctaggaccgactagttcttatgtgcttctagtctccaaatgtggttgatagttattttgctctaagatcaacagtaatgaagtataaatcatcgttgtggtgtgctactcggttaattgagcattaacacacacaaacatgacgaggatggtataatctccaaaaatgtgtactttgttaggtgggaccctatagccttgattaatgtgctatgttaggcatgcctggaaacgtgtgacgcatatgttttgtgaacctgttgatattatatgtgcttttatattaccatattttattaaaatactaatatttattactagtaagatataacattctatctagcttaaaaactaaccataaatattccataataactagatttaccaaactaatatactaaatatacataataaatacaaaattaacaagacaataatcaatatttatgagcttaatatatttagacattatggttggtcgacgataatcatgctaacttttcgtaattgcttgattgaaatatgcttagaataatgcctctttgttctacatggcaaatagggaccattatggtgtaacaccctgggaaccacaaacaccccgaaatgctactaaactacacaactaaccttcatatataaaatttcgacagcatctcctttgaaaatttgcatagacgtggaagcaacagagtataaacagatctagctagctaagtttaaacggccggccaaacgtgcaagcgctactagacaattcagtacattaaaaacgtccgcaatgtgttattaagttgtctaagcgtcaatttatttacaattgaatatatcctgcca

SEQ ID NO: 164 - DNA, 15303 bp, Artificial Sequence
  RV026520 T-DNA
caaacaaacatacacagcgatttattcacacgaacccgaattacaacggtatatatcctgtcagccaacaccaaaacatcaaaaaaatcgggatcaggatcaggatctgcggccgcatcctgcaggtttaaacggccggccttcactagctagctgctaagctcaaacgagcaggaagcaacgagagggtggcgcgcgaccgacgtgcgtacgtagcatgagcctgagtggagacgttggacgtgtatgtatatacctctctgcgtgttaactatgtacgtaagcggcaggcagtgcaataagtgtggctctgtagtatgtacgtgcgggtacgatgctgtaagctactgaggcaagtccataaataaataatgacacgtgcgtgttctataatctcttcgcttcttcatttgtccccttgcggagtttggcatccattgatgccgttacgctgagaacagacacagcagacgaaccaaaagtgagttcttgtatgaaactatgacccttcatcgctaggctcaaacagcaccccgtacgaacacagcaaattagtcatctaactattagcccctacatgtttcagacgatacataaatatagcccatccttagcaattagctattggccctgcccatcccaagcaatgatctcgaagtatttttaatatatagtatttttaatatgtagcttttaaaattagaagataattttgagacaaaaatctccaagtatttttttgggtattttttactgcctccgtttttctttatttctcgtcacctagtttaattttgtgctaatcggctataaacgaaacagagagaaaagttactctaaaagcaactccaacagattagatataaatcttatatcctgcctagagctgttaaaaagatagacaactttagtggattagtgtatgcaacaaactctccaaatttaagtatcccaactacccaacgcatatcgttcccttttcattggcgcacgaactttcacctgctatagccgacgtacatgttcgttttttttgggcggcgcttactttcttccccgttcgttctcagcatcgcaactcaatttgttatggcggagaagcccttgtatcccaggtagtaatgcacagatatgcattattattattcataaaatcgagctagttaccctatgaggtgacatgaagcgctcacggttactatgacggttagcttcacgactgttggtggcagtagcgtacgacttagctatagttccggacttacctaactgactagagtcacacttagctgaccctagtcacttaggcgcgccaagcttggatctcctgcaggatctggccggccggatgggcggatctcgtacctcaactttgtatagaaaagttgggccagaatggcccggaccgggttaccaagcggccgcgaattccagaagaccaaagggcaattgagacttttcaacaaagggtaatatcgggaaacctcctcggattccattgcccagctatctgtcacttcatcaaaaggacagtagaaaaggaaggtggcacctacaaatgccatcattgcgataaaggaaaggctatcgttcaagatgcctctgccgacagtggtcccaaagatggacccccacccacgaggagcatcgtggaaaaagaagacgttccaaccacgtcttcaaagcaagtggattgatgtgatatctccactgacgtaagggatgacgcacaatcccactatccttcgcaagacccttcctctatataaggaagttcatttcatttggagaggacccatggaacctcaccaacaacaaccaaatgaggataataacggtggcgccaaagggaactttctttgcaggcaaaccagtacaaggtggaatcccactactgaccagataagaatattgaaggaactgtactacatcaaaggtgttaggtccccaaatggagctgagattcagcagatctctgctaggcttagaaagtacggcaagattgaaggcaagaatgtattttattggtttcagaaccataaagctcgtgagaggcaaaagaaaagactcaccaatgaagtccccatgcaacaaagaactgcctggaaacctgaagattattactcttacaagtactccaacagtaataataatcctgggttttcttcggcttcttcatctgcaaataccggtgtggttactgttgggcagacagatagtcatggatatggatcggtaaccatgcaggagaagaattcttgggactgttcagcaccagctggtggtagcaatggtgctggtagtggatccatgagcaatattaactatggatcaggggttgacattaactctcacagttcatcctatgctgtatttggtcaagaacaagaagcagctgcaaagattgagactcttcctctatttccaatgcttggtgaggacatcagtagctctttcaacatcaacaatatcaacccagacttttattacagtagcggctgtggctatggtgattatggcaatgacacttcttcccgtacttccctggaccttagtctctactcctacaatggccaaccacaagattattaggtacctgacatcttatagtctgcaacctctcgtgtctgaattcctatctttatcaagtgttattgcttccacgactataggacagctttcgtcgaaaggttttgctcatgtgatctcgaaggattcatctagtctgatttttcgtgacttgtatcggttttattggattcatccaacatatatcaataaaaaatgagttgtgtttcctttcttcctagttcagttaaaattatttccctcctgcgcttgtgctgtaattgtctgtgtacctgttgtttgtgactgtgttagttcccttggatatgatttcgtatttgatatgtacatggagatagcttagcttcattattggagtatgaagttagtatgacatagtcactctcctggaaaattgacactgcaaaccatatttttattctgaaccacaaatcctagtcagtccgctggcatatgccgtccgtttgctgaatccagaacgtgggtttggagatgtacggctgagatgcctctatgcgaaggggatttcgtggtgaaacgagatgggagtagagcaacgcccgtggaagatgcttcaaacttccacacttttgagcaacgatcggcagtagtaaggtagacgatttcaagatcaaagcatatgaagataaacaacatcaacaacaaaatttgttggggttctatagagagaaacagagctacatacatacactgttttgtatctaccatctgagatgatgaaaagatgaaaaactaaagaatgccccggcgccaacgccaggacacgccgcgcgcgcgtcacccgagccatctcttgacccagccggcgctgtatatttacacacgttgcagcatcgatcaccacctgttcgatcgcgtcgccgtcaccaagcttggcgcgccggtcacccggtccgggcctagaaggccacccggggctcggcgttaggcttttagtccgctaggtggctagaccgaggttaggacgctagttcactaggggcctagtggtgttttaaggatgggcaagtttgtacaaaaaagcaggctggcgccggaaccaattcagtcgagtgcggccgccagtgtgatggatatctcgacccgggtgattgcggttacatcatgtacggaaaaataattctaatccttgatttaaatttgaacttgactatttatttattctttatttcattttgtaaatcattttatgtatctcctggcaagcaattttatccaccttgcaccaacaccttcgggttccataatcaaaccaccttaacttcacaccatgctgtaactcacaccgcccagcatctccaatgtgaaagaagctaaaatttaataaacaatcatacgaagcagtgacaaaataccagatggtattaatgcttcgataaaattaattggaaagtataaaatggtagaaaataataaattataattaatttaagtaagataaaaaataattaaaaactaaaatgttaaaattttaaaaaaattattttaaataatatttaaaaacattaaaaatcattttaaaaaatttatttatagaacaattaaataaatatttcagctaataaaaaacaaaagcttacctagccttagaagacaacttgtccaacaattagatgatacccattgcccttacgttttctttaacatcaattattgtttttgtcaacaagctatcttttagttttattttattggtaaaaaatatgtcgccttcaagttgcatcatttaacacatctcgtcattagaaaaataaaactcttccctaaacgattagtagaaaaaatcattcgataataaataagaaagaaaaattagaaaaaaataacttcattttaaaaaaatcattaaggctatattttttaaatgactaattttatatagactgtaactaaaagtatacaatttattatgctatgtatcttaaagaattacttataaaaatctacggaagaatatcttacaaagtgaaaaacaaatgagaaagaatttagtgggatgattatgattttatttgaaaattgaaaaaataattattaaagactttagtggagtaagaaagctttcctattagtcttttcttatccataaaaaaaaaaaaaaaaatctagcgtgacagcttttccatagattttaataatgtaaaatactggtagcagccgaccgttcaggtaatggacactgtggtcctaacttgcaacgggtgcgggcccaatttaataacgccgtggtaacggataaagccaagcgtgaagcggtgaaggtacatctctgactccgtcaagattacgaaaccgtcaactacgaaggactccccgaaatatcatctgtgtcataaacaccaagtcacaccatacatgggcacgcgtcacaatatgattggagaacggttccaccgcatatgctataaaatgcccccacacccctcgaccctaatcgcacttcaattgcaatcaaattagttcattctctttgcgcagttccctacctctcctttcaaggttcgtagatttcttccgtttttttttcttcttctttattgtttgttctacatcagcatgatgttgatttgattgtgttttctatcgtttcatcgattataaattttcataatcagaagattcagcttttattaatgcaagaacgtccttaattgatgattttataaccgtaaattaggtctaattagagtttttttcataaagattttcagatccgtttacaacaagccttaattgttgattctgtagtcgtagattaaggtttttttcatgaactacttcagatccgttaaacaacagccttatttgttgatacttcagtcgtttttcaagaaattgttcagatccgttgataaaagccttattcgttgattctgtatggtatttcaagagatattgctcaggtcctttagcaactaccttatttgttgattctgtggccatagattaggattttttttcacgaaattgcttcttgaaattacgtgatggattttgattctgatttatcttgtgattgttgactctacagccatggcccacagcaagcacggcctgaaggaggagatgaccatgaagtaccacatggagggctgcgtgaacggccacaagttcgtgatcaccggcgagggcatcggctaccccttcaagggcaagcagaccatcaacctgtgcgtgatcgagggcggccccctgcccttcagcgaggacatcctgagcgccggcttcaagtacggcgaccggatcttcaccgagtacccccaggacatcgtggactacttcaagaacagctgccccgccggctacacctggggccggagcttcctgttcgaggacggcgccgtgtgcatctgtaacgtggacatcaccgtgagcgtgaaggagaactgcatctaccacaagagcatcttcaacggcgtgaacttccccgccgacggccccgtgatgaagaagatgaccaccaactgggaggccagctgcgagaagatcatgcccgtgcctaagcagggcatcctgaagggcgacgtgagcatgtacctgctgctgaaggacggcggccggtaccggtgccagttcgacaccgtgtacaaggccaagagcgtgcccagcaagatgcccgagtggcacttcatccagcacaagctgctgcgggaggaccggagcgacgccaagaaccagaagtggcagctgaccgagcacgccatcgccttccccagcgccctggcctgagagctcgaatttccccgatcgttcaaacatttggcaataaagtttcttaagattgaatcctgttgccggtcttgcgatgattatcatataatttctgttgaattacgttaagcatgtaataattaacatgtaatgcatgacgttatttatgagatgggtttttatgattagagtcccgcaattatacatttaatacgcgatagaaaacaaaatatagcgcgcaaactaggataaattatcgcgcgcggtgtcatctatgttactagatcgggaattctagtggccggcccagctgatatctagacccagctttcttgtacaaagtggccgttaacggatcggccagaatggcccggaccgggttaccgaattcgagctcggtaccctgggatccgatatcgatgggccctggccgaagcttggtcacccggtccgggcctagaaggccagcttcggccgccccgggcaactttattatacaaagttgatggtacggatccgtcgacggcgcgccgcggacctgaattccagcacactggcggccgttagtctaaaaacggcccctaactaacgcttagttgcccgctagattagtcccccgttagtgcctagttagacacacgacgaactaggggctactagtaacggccgccagtgtgctcggtacggccagaatggccatctggattcagcagggggtgattgcggttacatcatgtacggaaaaataattctaatccttgatttaaatttgaacttgactatttatttattctttatttcattttgtaaatcattttatgtatctcctggcaagcaattttatccaccttgcaccaacaccttcgggttccataatcaaaccaccttaacttcacaccatgctgtaactcacaccgcccagcatctccaatgtgaaagaagctaaaatttaataaacaatcatacgaagcagtgacaaaataccagatggtattaatgcttcgataaaattaattggaaagtataaaatggtagaaaataataaattataattaatttaagtaagataaaaaataattaaaaactaaaatgttaaaattttaaaaaaattattttaaataatatttaaaaacattaaaaatcattttaaaaaatttatttatagaacaattaaataaatatttcagctaataaaaaacaaaagcttacctagccttagaagacaacttgtccaacaattagatgatacccattgcccttacgttttctttaacatcaattattgtttttgtcaacaagctatcttttagttttattttattggtaaaaaatatgtcgccttcaagttgcatcatttaacacatctcgtcattagaaaaataaaactcttccctaaacgattagtagaaaaaatcattcgataataaataagaaagaaaaattagaaaaaaataacttcattttaaaaaaatcattaaggctatattttttaaatgactaattttatatagactgtaactaaaagtatacaatttattatgctatgtatcttaaagaattacttataaaaatctacggaagaatatcttacaaagtgaaaaacaaatgagaaagaatttagtgggatgattatgattttatttgaaaattgaaaaaataattattaaagactttagtggagtaagaaagctttcctattagtcttttcttatccataaaaaaaaaaaaaaaaatctagcgtgacagcttttccatagattttaataatgtaaaatactggtagcagccgaccgttcaggtaatggacactgtggtcctaacttgcaacgggtgcgggcccaatttaataacgccgtggtaacggataaagccaagcgtgaagcggtgaaggtacatctctgactccgtcaagattacgaaaccgtcaactacgaaggactccccgaaatatcatctgtgtcataaacaccaagtcacaccatacatgggcacgcgtcacaatatgattggagaacggttccaccgcatatgctataaaatgcccccacacccctcgaccctaatcgcacttcaattgcaatcaaattagttcattctctttgcgcagttccctacctctcctttcaaggttcgtagatttcttccgtttttttttcttcttctttattgtttgttctacatcagcatgatgttgatttgattgtgttttctatcgtttcatcgattataaattttcataatcagaagattcagcttttattaatgcaagaacgtccttaattgatgattttataaccgtaaattaggtctaattagagtttttttcataaagattttcagatccgtttacaacaagccttaattgttgattctgtagtcgtagattaaggtttttttcatgaactacttcagatccgttaaacaacagccttatttgttgatacttcagtcgtttttcaagaaattgttcagatccgttgataaaagccttattcgttgattctgtatggtatttcaagagatattgctcaggtcctttagcaactaccttatttgttgattctgtggccatagattaggattttttttcacgaaattgcttcttgaaattacgtgatggattttgattctgatttatcttgtgattgttgactctacagccatggctgcaactactcttacatctgctttacctggtgctttcagttcatcccagagaccaagtgctcctttcaacttacaaagatcacctagagtgcttagaaggttcaacagaaagacaggacgtcaacctcgtggacttgttcgtgctgcaaaggctcaagcggcgcaaaacctgccagagaaattcgatgaaacaagactctgggaggccctcaggggatttggggttagtccaagtagggttacttacgctcccgtcggattcggagattaccactggaccgtcacagatgaagacgggagaccttggttcgcaactgtcagtgacctcgaacacaaagagcattgcgggcagggagcacaagcagcccttaaaggactcagacaagctatggacactgccctcgcacttagagatagggacggactcagattcgtggttgctccagtggcagcaacagatgggggtggccctgtccttccccttgacgctaggtatgcactcacagtcttccctcacgtcccaggaagaacaggagagttcggacaaagactcacagaggcagagagggacagactgcttgctcttctggcagaactccacggaagaacacctcctgaaacaaccccaccagccgatatggaaccaccaggacttcctggtgttagagcagcactcgccgaaagtgaaggaccttggagtggaggaccatttgcagaacccgctagacttcttctcagagaacacgaggccacactgcacgcaagactcgctgaattcgaagccctcgtcgcaagagttaagggtcgtggagcacctcttgtcgttacccacggagaaccacacccaggcaacttgatcctcggagaggaaggctatctcctcgtggactgggatacagttggactggctccagctgaaagggatttgagtctcatctcagacgacccagctgacctcgcaagatacgcagagcttacaggaagaactccagacccagacgcactcgcactctatagactgcgttggagtctccttgatgtggctgagttcgtcgagtggttcagggctgaacaccaaagaacccaagacaccgagagtgcatggaaggggttcactgacacacttgggcaattggctgctggtggatcagctgcatagcaaacttatctctgttatgaatcagaagaagttcatgtctcgtttcatttaaaactttggtggtttgtgttttggggccttgtaaagcccctgatgaataattgttcaactatgtttccgttcctgtgttatacctttctttctaatgagtaatgacatcaaacttcttctgtattgaaattatgtccttgtgagtctctttatcatcgtttcgtctttacattatatgtgctacttttgtctaatgagcctgaaaagtggctccaatggtacgcactggaagatttgttggcttctggtagatatagcgacagtgttgagcttgtaatatcatgtctcttattgctaaattagttcctttcttaacagaaaccttcaaagtttttgtttttgttttcatttacctaatgtacacatacgctggccatgactaacaacatgtccaggcttagagcatatttttttctagcttaaattgttaacttgtcattcagtaaaatccgagaattgtgaagctctaattgaagctaattcgttttataaagtcagttaaaaagtatactaaattatccaacttttcttcaaaatctcaaaattctatgacaaaacgatagtctttgtttatgtcagtaccacaaagaggtggaaaaaaacaccaaaaaaacaataagcaaactatacactgagaagaaaaataaaagagagctcaatagatgttttatactaacggtagattagatcaaagatccaagctttactctacatagagcagaacccagaatcccttcatatctcttttattctagcaccgataatctactgaaaagaagacacttagagctctgtctctttgtcaaagaagtcccagccgtcatccagaagctccttacgttcattaacagaggccgcaattggatcgggtttacttattttgtgggtatctatacttttattagatttttaatcaggctcctgatttctttttatttcgattgaattcctgaacttgtattattcagtagatcgaataaattataaaaagataaaatcataaaataatattttatcctatcaatcatattaaagcaatgaatatgtaaaattaatcttatctttattttaaaaaatcatataggtttagtatttttttaaaaataaagataggattagttttactattcactgcttattacttttaaaaaaatcataaaggtttagtatttttttaaaataaatataggaatagttttactattcactgctttaatagaaaaatagtttaaaatttaagatagttttaatcccagcatttgccacgtttgaacgtgagccgaaacgatgtcgttacattatcttaacctagctgaaacgatgtcgtcataatatcgccaaatgccaactggactacgtcgaacccacaaatcccacaaagcgcgtgaaatcaaatcgctcaaaccacaaaaaagaacaacgcgtttgttacacgctcaatcccacgcgagtagagcacagtaaccttcaaataagcgaatggggcataatcagaaatccgaaataaacctaggggcattatcggaaatgaaaagtagctcactcaatataaaaatctaggaaccctagttttcgttatcactctgtgctccctcgctctatttctcagtctctgtgtttgcggctgaggattccgaacgagtgaccttcttcgtttctcgcaaaggtaacagcctctgctcttgtctcttcgattcgatctatgcctgtctcttatttacgatgatgtttcttcggttatgtttttttatttatgctttatgctgttgatgttcggttgtttgtttcgctttgtttttgtggttcagttttttaggattcttttggtttttgaatcgattaatcggaagagattttcgagttatttggtgtgttggaggtgaatcttttttttgaggtcatagatctgttgtatttgtgttataaacatgcgactttgtatgattttttacgaggttatgatgttctggttgttttattatgaatctgttgagacagaaccatgatttttgttgatgttcgtttacactattaaaggtttgttttaacaggattaaaagttttttaagcatgttgaaggagtcttgtagatatgtaaccgtcgatagtttttttgtgggtttgttcacatgttatcaagcttaatcttttactatgtatgcgaccatatctggatccagcaaaggcgattttttaattccttgtgaaacttttgtaatatgaagttgaaattttgttattggtaaactataaatgtgtgaagttggagtatacctttaccttcttatttggctttgtgatagtttaatttatatgtattttgagttctgacttgtatttctttgaattgattctagtttaagtaatcatggcctcctccgagaacgtcatcaccgagttcatgcgcttcaaggtgcgcatggagggcaccgtgaacggccacgagttcgagatcgagggcgagggcgagggccgcccctacgagggccacaacaccgtgaagctgaaggtgacgaagggcggccccctgcccttcgcctgggacatcctgtccccccagttccagtacggctccaaggtgtacgtgaagcaccccgccgacatccccgactacaagaagctgtccttccccgagggcttcaagtgggagcgcgtgatgaacttcgaggacggcggcgtggcgaccgtgacccaggactcctccctgcaggacggctgcttcatctacaaggtgaagttcatcggcgtgaacttcccctccgacggccccgtgatgcagaagaagaccatgggctgggaggcctccaccgagcgcctgtacccccgcgacggcgtgctgaagggcgagacccacaaggccctgaagctgaaggacggcggccactacctggtggagttcaagtccatctacatggccaagaagcccgtgcagctgcccggctactactacgtggacgccaagctggacatcacctcccacaacgaggactacaccatcgtggagcagtacgagcgcaccgagggccgccaccacctgttcctgtagttttgtgatctgatgataagtggttggttcgtgtctcatgcacttgggaggtgatctatttcacctggtgtagtttgtgtttccgtcagttggaaaaacttatccctatcgatttcgttttcattttctgcttttcttttatgtaccttcgtttgggcttgtaacgggcctttgtatttcaactctcaataataatccaagtgcatgttaaacaatttgtcatctgtttcggctttgatatactactggtgaagatgggccgtactactgcatcacaacgaaaaataataataagatgaaaaacttgaagtggaaaaaaaaaaaaacttgaatgttcactactactcattgaccataatgtttaacatacatagctcaatagtatttttgtgaatatggcaacacaaacagtccaaaacaattgtctcttactataccaaaccaagggcgccgcttgtttgccactctttgtgtgcaatagtgtgattaccacatctccacattcaatatattccctgaattatctgacgattttgatggctcactgttttcccaagtcttgaattgtcttctgtgcgccagtcaaatgcatatgtgttgagtttatcttttaaatatcaagcttttgtttttaacttttgtttgtaaccaaaaactcacagtaggagtttgatcacataattttatgtttgcctttgcaatttctagtgagtctttgattaaaagcttgaaaagaaaatgcagccaagcttaccaagtaagttatgtgtattaaccagaggaagagagaatcttgcaaaatttcaacaaacacaaaaagaagtattactacgattggtggagaaagaaaacgattccaaatcttgaactgttgttgtaaaagcatagcagaaagtgggagacaaccgaaatagaaatgactataacttaatttaatgttatcattataatttcttctagcaaatatttagaaagtaaatatcacatcaacctttaatgtaattaagctttctctttttgattcatgtgagatgaaaagaaaaaaaagaagagaaaagtgtagaaaacacatcatttctaagctgaagctgaggtacaaattaattaataagtgactagggtcacgtgaccctagtcacttatgattccgatgacttcgtaggttcctagctcaagccgctcgtgtccaagcgtcacttacgattagctaatgattacggcatctaggaccgactagttcttatgtgcttctagtctccaaatgtggttgatagttattttgctctaagatcaacagtaatgaagtataaatcatcgttgtggtgtgctactcggttaattgagcattaacacacacaaacatgacgaggatggtataatctccaaaaatgtgtactttgttaggtgggaccctatagccttgattaatgtgctatgttaggcatgcctggaaacgtgtgacgcatatgttttgtgaacctgttgatattatatgtgcttttatattaccatattttattaaaatactaatatttattactagtaagatataacattctatctagcttaaaaactaaccataaatattccataataactagatttaccaaactaatatactaaatatacataataaatacaaaattaacaagacaataatcaatatttatgagcttaatatatttagacattatggttggtcgacgataatcatgctaacttttcgtaattgcttgattgaaatatgcttagaataatgcctctttgttctacatggcaaatagggaccattatggtgtaacaccctgggaaccacaaacaccccgaaatgctactaaactacacaactaaccttcatatataaaatttcgacagcatctcctttgaaaatttgcatagacgtggaagcaacagagtataaacagatctagctagctaagtttaaacggccggccaaacgtgcaagcgctactagacaattcagtacattaaaaacgtccgcaatgtgttattaagttgtctaagcgtcaatttatttacaattgaatatatcctgcca

SEQ ID NO: 165 - DNA, 15478 bp, Artificial Sequence
  RV026533 T-DNA
caaacaaacatacacagcgatttattcacacgaacccgaattacaacggtatatatcctgtcagccaacaccaaaacatcaaaaaaatcgggatcaggatcaggatctgcggccgcatcctgcaggtttaaacggccggccttcactagctagctgctaagctcaaacgagcaggaagcaacgagagggtggcgcgcgaccgacgtgcgtacgtagcatgagcctgagtggagacgttggacgtgtatgtatatacctctctgcgtgttaactatgtacgtaagcggcaggcagtgcaataagtgtggctctgtagtatgtacgtgcgggtacgatgctgtaagctactgaggcaagtccataaataaataatgacacgtgcgtgttctataatctcttcgcttcttcatttgtccccttgcggagtttggcatccattgatgccgttacgctgagaacagacacagcagacgaaccaaaagtgagttcttgtatgaaactatgacccttcatcgctaggctcaaacagcaccccgtacgaacacagcaaattagtcatctaactattagcccctacatgtttcagacgatacataaatatagcccatccttagcaattagctattggccctgcccatcccaagcaatgatctcgaagtatttttaatatatagtatttttaatatgtagcttttaaaattagaagataattttgagacaaaaatctccaagtatttttttgggtattttttactgcctccgtttttctttatttctcgtcacctagtttaattttgtgctaatcggctataaacgaaacagagagaaaagttactctaaaagcaactccaacagattagatataaatcttatatcctgcctagagctgttaaaaagatagacaactttagtggattagtgtatgcaacaaactctccaaatttaagtatcccaactacccaacgcatatcgttcccttttcattggcgcacgaactttcacctgctatagccgacgtacatgttcgttttttttgggcggcgcttactttcttccccgttcgttctcagcatcgcaactcaatttgttatggcggagaagcccttgtatcccaggtagtaatgcacagatatgcattattattattcataaaatcgagctagttaccctatgaggtgacatgaagcgctcacggttactatgacggttagcttcacgactgttggtggcagtagcgtacgacttagctatagttccggacttacctaactgactagagtcacacttagctgaccctagtcacttaggcgcgccaagcttggatctcctgcaggatctggccggccggatgggcggatctcgtacctcaactttgtatagaaaagttgggccagaatggcccggaccgggttaccaagcggccgcgaattccagaagaccaaagggcaattgagacttttcaacaaagggtaatatcgggaaacctcctcggattccattgcccagctatctgtcacttcatcaaaaggacagtagaaaaggaaggtggcacctacaaatgccatcattgcgataaaggaaaggctatcgttcaagatgcctctgccgacagtggtcccaaagatggacccccacccacgaggagcatcgtggaaaaagaagacgttccaaccacgtcttcaaagcaagtggattgatgtgatatctccactgacgtaagggatgacgcacaatcccactatccttcgcaagacccttcctctatataaggaagttcatttcatttggagaggacccatggagtttcaacaacaacaagatgaagagatgataaaccatgttgggaaaatgagcaacaacacaagtaacaataataataataataataactatttatgtagacaaagtagcacaagatggactccaacaacagaacaaataaagcttttaaaagatctttattatttacaaggaattagatctcctactgctgatcaaattcaaagcatttgtgctaggttacgtcgttatggaaaaattgaaggcaaaaatgttttttattggtttcaaaatcataaggctagggaaagacaaaaaaagaagcttactcctacttctcctaataataataataataataataataataatttcataagaaataataataataataataataatggaaatattaacacttttcatgctaaatatccttgttccttcaataataatcccggggtttcttgttcaagttcaccagcaggtgtgatttctggaggtgggcaattgatggggagttttgggtatggagctgtgactatggagactaaatttagggtaagaggaggtattcctattccaaatggagcaaatcaatggagtaactatttcaacccaaacaatccaacatcttactcaaatttctttattgacaaggtatcatcaaatgttgatcatcattatccatacattaaccatcatgatcatgatcatgatcatgatcatcatgatcatgatcattatggcccacaatcacctcatgagattcagactcttcctctctttcccatgcacaatgatcatcatgatctcgatctcgatctcgatctcgatcacgatcaagggttctacacctataagcctcaatcggacggctgtaattataccggaggatatcgatggtcatctaatgttaatggtggacatacttctcttgagcttagtcttaactcttatggatttggatgctattcacctaattaaggtacctgacatcttatagtctgcaacctctcgtgtctgaattcctatctttatcaagtgttattgcttccacgactataggacagctttcgtcgaaaggttttgctcatgtgatctcgaaggattcatctagtctgatttttcgtgacttgtatcggttttattggattcatccaacatatatcaataaaaaatgagttgtgtttcctttcttcctagttcagttaaaattatttccctcctgcgcttgtgctgtaattgtctgtgtacctgttgtttgtgactgtgttagttcccttggatatgatttcgtatttgatatgtacatggagatagcttagcttcattattggagtatgaagttagtatgacatagtcactctcctggaaaattgacactgcaaaccatatttttattctgaaccacaaatcctagtcagtccgctggcatatgccgtccgtttgctgaatccagaacgtgggtttggagatgtacggctgagatgcctctatgcgaaggggatttcgtggtgaaacgagatgggagtagagcaacgcccgtggaagatgcttcaaacttccacacttttgagcaacgatcggcagtagtaaggtagacgatttcaagatcaaagcatatgaagataaacaacatcaacaacaaaatttgttggggttctatagagagaaacagagctacatacatacactgttttgtatctaccatctgagatgatgaaaagatgaaaaactaaagaatgccccggcgccaacgccaggacacgccgcgcgcgcgtcacccgagccatctcttgacccagccggcgctgtatatttacacacgttgcagcatcgatcaccacctgttcgatcgcgtcgccgtcaccaagcttggcgcgccggtcacccggtccgggcctagaaggccacccggggctcggcgttaggcttttagtccgctaggtggctagaccgaggttaggacgctagttcactaggggcctagtggtgttttaaggatgggcaagtttgtacaaaaaagcaggctggcgccggaaccaattcagtcgagtgcggccgccagtgtgatggatatctcgacccgggtgattgcggttacatcatgtacggaaaaataattctaatccttgatttaaatttgaacttgactatttatttattctttatttcattttgtaaatcattttatgtatctcctggcaagcaattttatccaccttgcaccaacaccttcgggttccataatcaaaccaccttaacttcacaccatgctgtaactcacaccgcccagcatctccaatgtgaaagaagctaaaatttaataaacaatcatacgaagcagtgacaaaataccagatggtattaatgcttcgataaaattaattggaaagtataaaatggtagaaaataataaattataattaatttaagtaagataaaaaataattaaaaactaaaatgttaaaattttaaaaaaattattttaaataatatttaaaaacattaaaaatcattttaaaaaatttatttatagaacaattaaataaatatttcagctaataaaaaacaaaagcttacctagccttagaagacaacttgtccaacaattagatgatacccattgcccttacgttttctttaacatcaattattgtttttgtcaacaagctatcttttagttttattttattggtaaaaaatatgtcgccttcaagttgcatcatttaacacatctcgtcattagaaaaataaaactcttccctaaacgattagtagaaaaaatcattcgataataaataagaaagaaaaattagaaaaaaataacttcattttaaaaaaatcattaaggctatattttttaaatgactaattttatatagactgtaactaaaagtatacaatttattatgctatgtatcttaaagaattacttataaaaatctacggaagaatatcttacaaagtgaaaaacaaatgagaaagaatttagtgggatgattatgattttatttgaaaattgaaaaaataattattaaagactttagtggagtaagaaagctttcctattagtcttttcttatccataaaaaaaaaaaaaaaaatctagcgtgacagcttttccatagattttaataatgtaaaatactggtagcagccgaccgttcaggtaatggacactgtggtcctaacttgcaacgggtgcgggcccaatttaataacgccgtggtaacggataaagccaagcgtgaagcggtgaaggtacatctctgactccgtcaagattacgaaaccgtcaactacgaaggactccccgaaatatcatctgtgtcataaacaccaagtcacaccatacatgggcacgcgtcacaatatgattggagaacggttccaccgcatatgctataaaatgcccccacacccctcgaccctaatcgcacttcaattgcaatcaaattagttcattctctttgcgcagttccctacctctcctttcaaggttcgtagatttcttccgtttttttttcttcttctttattgtttgttctacatcagcatgatgttgatttgattgtgttttctatcgtttcatcgattataaattttcataatcagaagattcagcttttattaatgcaagaacgtccttaattgatgattttataaccgtaaattaggtctaattagagtttttttcataaagattttcagatccgtttacaacaagccttaattgttgattctgtagtcgtagattaaggtttttttcatgaactacttcagatccgttaaacaacagccttatttgttgatacttcagtcgtttttcaagaaattgttcagatccgttgataaaagccttattcgttgattctgtatggtatttcaagagatattgctcaggtcctttagcaactaccttatttgttgattctgtggccatagattaggattttttttcacgaaattgcttcttgaaattacgtgatggattttgattctgatttatcttgtgattgttgactctacagccatggcccacagcaagcacggcctgaaggaggagatgaccatgaagtaccacatggagggctgcgtgaacggccacaagttcgtgatcaccggcgagggcatcggctaccccttcaagggcaagcagaccatcaacctgtgcgtgatcgagggcggccccctgcccttcagcgaggacatcctgagcgccggcttcaagtacggcgaccggatcttcaccgagtacccccaggacatcgtggactacttcaagaacagctgccccgccggctacacctggggccggagcttcctgttcgaggacggcgccgtgtgcatctgtaacgtggacatcaccgtgagcgtgaaggagaactgcatctaccacaagagcatcttcaacggcgtgaacttccccgccgacggccccgtgatgaagaagatgaccaccaactgggaggccagctgcgagaagatcatgcccgtgcctaagcagggcatcctgaagggcgacgtgagcatgtacctgctgctgaaggacggcggccggtaccggtgccagttcgacaccgtgtacaaggccaagagcgtgcccagcaagatgcccgagtggcacttcatccagcacaagctgctgcgggaggaccggagcgacgccaagaaccagaagtggcagctgaccgagcacgccatcgccttccccagcgccctggcctgagagctcgaatttccccgatcgttcaaacatttggcaataaagtttcttaagattgaatcctgttgccggtcttgcgatgattatcatataatttctgttgaattacgttaagcatgtaataattaacatgtaatgcatgacgttatttatgagatgggtttttatgattagagtcccgcaattatacatttaatacgcgatagaaaacaaaatatagcgcgcaaactaggataaattatcgcgcgcggtgtcatctatgttactagatcgggaattctagtggccggcccagctgatatctagacccagctttcttgtacaaagtggccgttaacggatcggccagaatggcccggaccgggttaccgaattcgagctcggtaccctgggatccgatatcgatgggccctggccgaagcttggtcacccggtccgggcctagaaggccagcttcggccgccccgggcaactttattatacaaagttgatggtacggatccgtcgacggcgcgccgcggacctgaattccagcacactggcggccgttagtctaaaaacggcccctaactaacgcttagttgcccgctagattagtcccccgttagtgcctagttagacacacgacgaactaggggctactagtaacggccgccagtgtgctcggtacggccagaatggccatctggattcagcagggggtgattgcggttacatcatgtacggaaaaataattctaatccttgatttaaatttgaacttgactatttatttattctttatttcattttgtaaatcattttatgtatctcctggcaagcaattttatccaccttgcaccaacaccttcgggttccataatcaaaccaccttaacttcacaccatgctgtaactcacaccgcccagcatctccaatgtgaaagaagctaaaatttaataaacaatcatacgaagcagtgacaaaataccagatggtattaatgcttcgataaaattaattggaaagtataaaatggtagaaaataataaattataattaatttaagtaagataaaaaataattaaaaactaaaatgttaaaattttaaaaaaattattttaaataatatttaaaaacattaaaaatcattttaaaaaatttatttatagaacaattaaataaatatttcagctaataaaaaacaaaagcttacctagccttagaagacaacttgtccaacaattagatgatacccattgcccttacgttttctttaacatcaattattgtttttgtcaacaagctatcttttagttttattttattggtaaaaaatatgtcgccttcaagttgcatcatttaacacatctcgtcattagaaaaataaaactcttccctaaacgattagtagaaaaaatcattcgataataaataagaaagaaaaattagaaaaaaataacttcattttaaaaaaatcattaaggctatattttttaaatgactaattttatatagactgtaactaaaagtatacaatttattatgctatgtatcttaaagaattacttataaaaatctacggaagaatatcttacaaagtgaaaaacaaatgagaaagaatttagtgggatgattatgattttatttgaaaattgaaaaaataattattaaagactttagtggagtaagaaagctttcctattagtcttttcttatccataaaaaaaaaaaaaaaaatctagcgtgacagcttttccatagattttaataatgtaaaatactggtagcagccgaccgttcaggtaatggacactgtggtcctaacttgcaacgggtgcgggcccaatttaataacgccgtggtaacggataaagccaagcgtgaagcggtgaaggtacatctctgactccgtcaagattacgaaaccgtcaactacgaaggactccccgaaatatcatctgtgtcataaacaccaagtcacaccatacatgggcacgcgtcacaatatgattggagaacggttccaccgcatatgctataaaatgcccccacacccctcgaccctaatcgcacttcaattgcaatcaaattagttcattctctttgcgcagttccctacctctcctttcaaggttcgtagatttcttccgtttttttttcttcttctttattgtttgttctacatcagcatgatgttgatttgattgtgttttctatcgtttcatcgattataaattttcataatcagaagattcagcttttattaatgcaagaacgtccttaattgatgattttataaccgtaaattaggtctaattagagtttttttcataaagattttcagatccgtttacaacaagccttaattgttgattctgtagtcgtagattaaggtttttttcatgaactacttcagatccgttaaacaacagccttatttgttgatacttcagtcgtttttcaagaaattgttcagatccgttgataaaagccttattcgttgattctgtatggtatttcaagagatattgctcaggtcctttagcaactaccttatttgttgattctgtggccatagattaggattttttttcacgaaattgcttcttgaaattacgtgatggattttgattctgatttatcttgtgattgttgactctacagccatggctgcaactactcttacatctgctttacctggtgctttcagttcatcccagagaccaagtgctcctttcaacttacaaagatcacctagagtgcttagaaggttcaacagaaagacaggacgtcaacctcgtggacttgttcgtgctgcaaaggctcaagcggcgcaaaacctgccagagaaattcgatgaaacaagactctgggaggccctcaggggatttggggttagtccaagtagggttacttacgctcccgtcggattcggagattaccactggaccgtcacagatgaagacgggagaccttggttcgcaactgtcagtgacctcgaacacaaagagcattgcgggcagggagcacaagcagcccttaaaggactcagacaagctatggacactgccctcgcacttagagatagggacggactcagattcgtggttgctccagtggcagcaacagatgggggtggccctgtccttccccttgacgctaggtatgcactcacagtcttccctcacgtcccaggaagaacaggagagttcggacaaagactcacagaggcagagagggacagactgcttgctcttctggcagaactccacggaagaacacctcctgaaacaaccccaccagccgatatggaaccaccaggacttcctggtgttagagcagcactcgccgaaagtgaaggaccttggagtggaggaccatttgcagaacccgctagacttcttctcagagaacacgaggccacactgcacgcaagactcgctgaattcgaagccctcgtcgcaagagttaagggtcgtggagcacctcttgtcgttacccacggagaaccacacccaggcaacttgatcctcggagaggaaggctatctcctcgtggactgggatacagttggactggctccagctgaaagggatttgagtctcatctcagacgacccagctgacctcgcaagatacgcagagcttacaggaagaactccagacccagacgcactcgcactctatagactgcgttggagtctccttgatgtggctgagttcgtcgagtggttcagggctgaacaccaaagaacccaagacaccgagagtgcatggaaggggttcactgacacacttgggcaattggctgctggtggatcagctgcatagcaaacttatctctgttatgaatcagaagaagttcatgtctcgtttcatttaaaactttggtggtttgtgttttggggccttgtaaagcccctgatgaataattgttcaactatgtttccgttcctgtgttatacctttctttctaatgagtaatgacatcaaacttcttctgtattgaaattatgtccttgtgagtctctttatcatcgtttcgtctttacattatatgtgctacttttgtctaatgagcctgaaaagtggctccaatggtacgcactggaagatttgttggcttctggtagatatagcgacagtgttgagcttgtaatatcatgtctcttattgctaaattagttcctttcttaacagaaaccttcaaagtttttgtttttgttttcatttacctaatgtacacatacgctggccatgactaacaacatgtccaggcttagagcatatttttttctagcttaaattgttaacttgtcattcagtaaaatccgagaattgtgaagctctaattgaagctaattcgttttataaagtcagttaaaaagtatactaaattatccaacttttcttcaaaatctcaaaattctatgacaaaacgatagtctttgtttatgtcagtaccacaaagaggtggaaaaaaacaccaaaaaaacaataagcaaactatacactgagaagaaaaataaaagagagctcaatagatgttttatactaacggtagattagatcaaagatccaagctttactctacatagagcagaacccagaatcccttcatatctcttttattctagcaccgataatctactgaaaagaagacacttagagctctgtctctttgtcaaagaagtcccagccgtcatccagaagctccttacgttcattaacagaggccgcaattggatcgggtttacttattttgtgggtatctatacttttattagatttttaatcaggctcctgatttctttttatttcgattgaattcctgaacttgtattattcagtagatcgaataaattataaaaagataaaatcataaaataatattttatcctatcaatcatattaaagcaatgaatatgtaaaattaatcttatctttattttaaaaaatcatataggtttagtatttttttaaaaataaagataggattagttttactattcactgcttattacttttaaaaaaatcataaaggtttagtatttttttaaaataaatataggaatagttttactattcactgctttaatagaaaaatagtttaaaatttaagatagttttaatcccagcatttgccacgtttgaacgtgagccgaaacgatgtcgttacattatcttaacctagctgaaacgatgtcgtcataatatcgccaaatgccaactggactacgtcgaacccacaaatcccacaaagcgcgtgaaatcaaatcgctcaaaccacaaaaaagaacaacgcgtttgttacacgctcaatcccacgcgagtagagcacagtaaccttcaaataagcgaatggggcataatcagaaatccgaaataaacctaggggcattatcggaaatgaaaagtagctcactcaatataaaaatctaggaaccctagttttcgttatcactctgtgctccctcgctctatttctcagtctctgtgtttgcggctgaggattccgaacgagtgaccttcttcgtttctcgcaaaggtaacagcctctgctcttgtctcttcgattcgatctatgcctgtctcttatttacgatgatgtttcttcggttatgtttttttatttatgctttatgctgttgatgttcggttgtttgtttcgctttgtttttgtggttcagttttttaggattcttttggtttttgaatcgattaatcggaagagattttcgagttatttggtgtgttggaggtgaatcttttttttgaggtcatagatctgttgtatttgtgttataaacatgcgactttgtatgattttttacgaggttatgatgttctggttgttttattatgaatctgttgagacagaaccatgatttttgttgatgttcgtttacactattaaaggtttgttttaacaggattaaaagttttttaagcatgttgaaggagtcttgtagatatgtaaccgtcgatagtttttttgtgggtttgttcacatgttatcaagcttaatcttttactatgtatgcgaccatatctggatccagcaaaggcgattttttaattccttgtgaaacttttgtaatatgaagttgaaattttgttattggtaaactataaatgtgtgaagttggagtatacctttaccttcttatttggctttgtgatagtttaatttatatgtattttgagttctgacttgtatttctttgaattgattctagtttaagtaatcatggcctcctccgagaacgtcatcaccgagttcatgcgcttcaaggtgcgcatggagggcaccgtgaacggccacgagttcgagatcgagggcgagggcgagggccgcccctacgagggccacaacaccgtgaagctgaaggtgacgaagggcggccccctgcccttcgcctgggacatcctgtccccccagttccagtacggctccaaggtgtacgtgaagcaccccgccgacatccccgactacaagaagctgtccttccccgagggcttcaagtgggagcgcgtgatgaacttcgaggacggcggcgtggcgaccgtgacccaggactcctccctgcaggacggctgcttcatctacaaggtgaagttcatcggcgtgaacttcccctccgacggccccgtgatgcagaagaagaccatgggctgggaggcctccaccgagcgcctgtacccccgcgacggcgtgctgaagggcgagacccacaaggccctgaagctgaaggacggcggccactacctggtggagttcaagtccatctacatggccaagaagcccgtgcagctgcccggctactactacgtggacgccaagctggacatcacctcccacaacgaggactacaccatcgtggagcagtacgagcgcaccgagggccgccaccacctgttcctgtagttttgtgatctgatgataagtggttggttcgtgtctcatgcacttgggaggtgatctatttcacctggtgtagtttgtgtttccgtcagttggaaaaacttatccctatcgatttcgttttcattttctgcttttcttttatgtaccttcgtttgggcttgtaacgggcctttgtatttcaactctcaataataatccaagtgcatgttaaacaatttgtcatctgtttcggctttgatatactactggtgaagatgggccgtactactgcatcacaacgaaaaataataataagatgaaaaacttgaagtggaaaaaaaaaaaaacttgaatgttcactactactcattgaccataatgtttaacatacatagctcaatagtatttttgtgaatatggcaacacaaacagtccaaaacaattgtctcttactataccaaaccaagggcgccgcttgtttgccactctttgtgtgcaatagtgtgattaccacatctccacattcaatatattccctgaattatctgacgattttgatggctcactgttttcccaagtcttgaattgtcttctgtgcgccagtcaaatgcatatgtgttgagtttatcttttaaatatcaagcttttgtttttaacttttgtttgtaaccaaaaactcacagtaggagtttgatcacataattttatgtttgcctttgcaatttctagtgagtctttgattaaaagcttgaaaagaaaatgcagccaagcttaccaagtaagttatgtgtattaaccagaggaagagagaatcttgcaaaatttcaacaaacacaaaaagaagtattactacgattggtggagaaagaaaacgattccaaatcttgaactgttgttgtaaaagcatagcagaaagtgggagacaaccgaaatagaaatgactataacttaatttaatgttatcattataatttcttctagcaaatatttagaaagtaaatatcacatcaacctttaatgtaattaagctttctctttttgattcatgtgagatgaaaagaaaaaaaagaagagaaaagtgtagaaaacacatcatttctaagctgaagctgaggtacaaattaattaataagtgactagggtcacgtgaccctagtcacttatgattccgatgacttcgtaggttcctagctcaagccgctcgtgtccaagcgtcacttacgattagctaatgattacggcatctaggaccgactagttcttatgtgcttctagtctccaaatgtggttgatagttattttgctctaagatcaacagtaatgaagtataaatcatcgttgtggtgtgctactcggttaattgagcattaacacacacaaacatgacgaggatggtataatctccaaaaatgtgtactttgttaggtgggaccctatagccttgattaatgtgctatgttaggcatgcctggaaacgtgtgacgcatatgttttgtgaacctgttgatattatatgtgcttttatattaccatattttattaaaatactaatatttattactagtaagatataacattctatctagcttaaaaactaaccataaatattccataataactagatttaccaaactaatatactaaatatacataataaatacaaaattaacaagacaataatcaatatttatgagcttaatatatttagacattatggttggtcgacgataatcatgctaacttttcgtaattgcttgattgaaatatgcttagaataatgcctctttgttctacatggcaaatagggaccattatggtgtaacaccctgggaaccacaaacaccccgaaatgctactaaactacacaactaaccttcatatataaaatttcgacagcatctcctttgaaaatttgcatagacgtggaagcaacagagtataaacagatctagctagctaagtttaaacggccggccaaacgtgcaagcgctactagacaattcagtacattaaaaacgtccgcaatgtgttattaagttgtctaagcgtcaatttatttacaattgaatatatcctgcca

SEQ ID NO: 166 - DNA, 15395 bp, Artificial Sequence
  RV026521 T-DNA
aattacaacggtatatatcctgtcagccaacaccaaaacatcaaaaaaatcgggatcaggatcaggatctgcggccgcatcctgcaggtttaaacggccggccttcactagctagctgctaagctcaaacgagcaggaagcaacgagagggtggcgcgcgaccgacgtgcgtacgtagcatgagcctgagtggagacgttggacgtgtatgtatatacctctctgcgtgttaactatgtacgtaagcggcaggcagtgcaataagtgtggctctgtagtatgtacgtgcgggtacgatgctgtaagctactgaggcaagtccataaataaataatgacacgtgcgtgttctataatctcttcgcttcttcatttgtccccttgcggagtttggcatccattgatgccgttacgctgagaacagacacagcagacgaaccaaaagtgagttcttgtatgaaactatgacccttcatcgctaggctcaaacagcaccccgtacgaacacagcaaattagtcatctaactattagcccctacatgtttcagacgatacataaatatagcccatccttagcaattagctattggccctgcccatcccaagcaatgatctcgaagtatttttaatatatagtatttttaatatgtagcttttaaaattagaagataattttgagacaaaaatctccaagtatttttttgggtattttttactgcctccgtttttctttatttctcgtcacctagtttaattttgtgctaatcggctataaacgaaacagagagaaaagttactctaaaagcaactccaacagattagatataaatcttatatcctgcctagagctgttaaaaagatagacaactttagtggattagtgtatgcaacaaactctccaaatttaagtatcccaactacccaacgcatatcgttcccttttcattggcgcacgaactttcacctgctatagccgacgtacatgttcgttttttttgggcggcgcttactttcttccccgttcgttctcagcatcgcaactcaatttgttatggcggagaagcccttgtatcccaggtagtaatgcacagatatgcattattattattcataaaatcgagctagttaccctatgaggtgacatgaagcgctcacggttactatgacggttagcttcacgactgttggtggcagtagcgtacgacttagctatagttccggacttacctaactgactagagtcacacttagctgaccctagtcacttaggcgcgccaagcttggatctcctgcaggatctggccggccggatgggcggatctcgtacctcaactttgtatagaaaagttgggccagaatggcccggaccgggttaccaagcggccgcgaattccagaagaccaaagggcaattgagacttttcaacaaagggtaatatcgggaaacctcctcggattccattgcccagctatctgtcacttcatcaaaaggacagtagaaaaggaaggtggcacctacaaatgccatcattgcgataaaggaaaggctatcgttcaagatgcctctgccgacagtggtcccaaagatggacccccacccacgaggagcatcgtggaaaaagaagacgttccaaccacgtcttcaaagcaagtggattgatgtgatatctccactgacgtaagggatgacgcacaatcccactatccttcgcaagacccttcctctatataaggaagttcatttcatttggagaggacccatggaacatcctgccaaacaacaacaacaagaacaaggaattaatgatcaaggtggtgaaggtggtggtggaagcaatggaaaaggtgggtttttgtgtaggcaaagtagcagtcgatggactccaacaactgaccaaatacgaatattgaaagagctttattataacaatggtgttcgctccccaagcgctgatcaaattcagaggatctctgctaggcttagacagtacggtaaaatcgaaggcaaaaacgttttttattggtttcaaaaccataaggctcgtgaaagacagaagaaaagattcacttcaaattctacttctcctattactacctccaatactactacaactactactgattttaaaatttcttcaactaataataatattaactggaagtctgaagatcattcctcctcttctcataacaaatttcctccaggaataacaattgctttaattgattcttgtttttgcagctccttcttcttcggttatggtcgccgttggccatatgggaaattacggatatgggagtgttcaatatcgtcgggaggaaatagcagtgtcgtcggttaccggagccacaacatgggatcatggatcggtatcgatccgtattcttctccggcagctgccgcggcggggggatcagccaatgtgtttgaaaaaacaaaatatgttgaagaaagcatggaagatcacgaggagcaagagatcgaaactctcccccttttccccattcatggtgaccggaataatctcggtggtttctgcagcatgaagccggaatattcagagagctactacaccaccacttggtacgggcggtctgacgataatggagccgccggttctcgggcttcgctggaactcagcctcaactcttacgccaccatctcacctgatgatggaatgtgaggtacctgacatcttatagtctgcaacctctcgtgtctgaattcctatctttatcaagtgttattgcttccacgactataggacagctttcgtcgaaaggttttgctcatgtgatctcgaaggattcatctagtctgatttttcgtgacttgtatcggttttattggattcatccaacatatatcaataaaaaatgagttgtgtttcctttcttcctagttcagttaaaattatttccctcctgcgcttgtgctgtaattgtctgtgtacctgttgtttgtgactgtgttagttcccttggatatgatttcgtatttgatatgtacatggagatagcttagcttcattattggagtatgaagttagtatgacatagtcactctcctggaaaattgacactgcaaaccatatttttattctgaaccacaaatcctagtcagtccgctggcatatgccgtccgtttgctgaatccagaacgtgggtttggagatgtacggctgagatgcctctatgcgaaggggatttcgtggtgaaacgagatgggagtagagcaacgcccgtggaagatgcttcaaacttccacacttttgagcaacgatcggcagtagtaaggtagacgatttcaagatcaaagcatatgaagataaacaacatcaacaacaaaatttgttggggttctatagagagaaacagagctacatacatacactgttttgtatctaccatctgagatgatgaaaagatgaaaaactaaagaatgccccggcgccaacgccaggacacgccgcgcgcgcgtcacccgagccatctcttgacccagccggcgctgtatatttacacacgttgcagcatcgatcaccacctgttcgatcgcgtcgccgtcaccaagcttggcgcgccggtcacccggtccgggcctagaaggccacccggggctcggcgttaggcttttagtccgctaggtggctagaccgaggttaggacgctagttcactaggggcctagtggtgttttaaggatgggcaagtttgtacaaaaaagcaggctggcgccggaaccaattcagtcgagtgcggccgccagtgtgatggatatctcgacccgggtgattgcggttacatcatgtacggaaaaataattctaatccttgatttaaatttgaacttgactatttatttattctttatttcattttgtaaatcattttatgtatctcctggcaagcaattttatccaccttgcaccaacaccttcgggttccataatcaaaccaccttaacttcacaccatgctgtaactcacaccgcccagcatctccaatgtgaaagaagctaaaatttaataaacaatcatacgaagcagtgacaaaataccagatggtattaatgcttcgataaaattaattggaaagtataaaatggtagaaaataataaattataattaatttaagtaagataaaaaataattaaaaactaaaatgttaaaattttaaaaaaattattttaaataatatttaaaaacattaaaaatcattttaaaaaatttatttatagaacaattaaataaatatttcagctaataaaaaacaaaagcttacctagccttagaagacaacttgtccaacaattagatgatacccattgcccttacgttttctttaacatcaattattgtttttgtcaacaagctatcttttagttttattttattggtaaaaaatatgtcgccttcaagttgcatcatttaacacatctcgtcattagaaaaataaaactcttccctaaacgattagtagaaaaaatcattcgataataaataagaaagaaaaattagaaaaaaataacttcattttaaaaaaatcattaaggctatattttttaaatgactaattttatatagactgtaactaaaagtatacaatttattatgctatgtatcttaaagaattacttataaaaatctacggaagaatatcttacaaagtgaaaaacaaatgagaaagaatttagtgggatgattatgattttatttgaaaattgaaaaaataattattaaagactttagtggagtaagaaagctttcctattagtcttttcttatccataaaaaaaaaaaaaaaaatctagcgtgacagcttttccatagattttaataatgtaaaatactggtagcagccgaccgttcaggtaatggacactgtggtcctaacttgcaacgggtgcgggcccaatttaataacgccgtggtaacggataaagccaagcgtgaagcggtgaaggtacatctctgactccgtcaagattacgaaaccgtcaactacgaaggactccccgaaatatcatctgtgtcataaacaccaagtcacaccatacatgggcacgcgtcacaatatgattggagaacggttccaccgcatatgctataaaatgcccccacacccctcgaccctaatcgcacttcaattgcaatcaaattagttcattctctttgcgcagttccctacctctcctttcaaggttcgtagatttcttccgtttttttttcttcttctttattgtttgttctacatcagcatgatgttgatttgattgtgttttctatcgtttcatcgattataaattttcataatcagaagattcagcttttattaatgcaagaacgtccttaattgatgattttataaccgtaaattaggtctaattagagtttttttcataaagattttcagatccgtttacaacaagccttaattgttgattctgtagtcgtagattaaggtttttttcatgaactacttcagatccgttaaacaacagccttatttgttgatacttcagtcgtttttcaagaaattgttcagatccgttgataaaagccttattcgttgattctgtatggtatttcaagagatattgctcaggtcctttagcaactaccttatttgttgattctgtggccatagattaggattttttttcacgaaattgcttcttgaaattacgtgatggattttgattctgatttatcttgtgattgttgactctacagccatggcccacagcaagcacggcctgaaggaggagatgaccatgaagtaccacatggagggctgcgtgaacggccacaagttcgtgatcaccggcgagggcatcggctaccccttcaagggcaagcagaccatcaacctgtgcgtgatcgagggcggccccctgcccttcagcgaggacatcctgagcgccggcttcaagtacggcgaccggatcttcaccgagtacccccaggacatcgtggactacttcaagaacagctgccccgccggctacacctggggccggagcttcctgttcgaggacggcgccgtgtgcatctgtaacgtggacatcaccgtgagcgtgaaggagaactgcatctaccacaagagcatcttcaacggcgtgaacttccccgccgacggccccgtgatgaagaagatgaccaccaactgggaggccagctgcgagaagatcatgcccgtgcctaagcagggcatcctgaagggcgacgtgagcatgtacctgctgctgaaggacggcggccggtaccggtgccagttcgacaccgtgtacaaggccaagagcgtgcccagcaagatgcccgagtggcacttcatccagcacaagctgctgcgggaggaccggagcgacgccaagaaccagaagtggcagctgaccgagcacgccatcgccttccccagcgccctggcctgagagctcgaatttccccgatcgttcaaacatttggcaataaagtttcttaagattgaatcctgttgccggtcttgcgatgattatcatataatttctgttgaattacgttaagcatgtaataattaacatgtaatgcatgacgttatttatgagatgggtttttatgattagagtcccgcaattatacatttaatacgcgatagaaaacaaaatatagcgcgcaaactaggataaattatcgcgcgcggtgtcatctatgttactagatcgggaattctagtggccggcccagctgatatctagacccagctttcttgtacaaagtggccgttaacggatcggccagaatggcccggaccgggttaccgaattcgagctcggtaccctgggatccgatatcgatgggccctggccgaagcttggtcacccggtccgggcctagaaggccagcttcggccgccccgggcaactttattatacaaagttgatggtacggatccgtcgacggcgcgccgcggacctgaattccagcacactggcggccgttagtctaaaaacggcccctaactaacgcttagttgcccgctagattagtcccccgttagtgcctagttagacacacgacgaactaggggctactagtaacggccgccagtgtgctcggtacggccagaatggccatctggattcagcagggggtgattgcggttacatcatgtacggaaaaataattctaatccttgatttaaatttgaacttgactatttatttattctttatttcattttgtaaatcattttatgtatctcctggcaagcaattttatccaccttgcaccaacaccttcgggttccataatcaaaccaccttaacttcacaccatgctgtaactcacaccgcccagcatctccaatgtgaaagaagctaaaatttaataaacaatcatacgaagcagtgacaaaataccagatggtattaatgcttcgataaaattaattggaaagtataaaatggtagaaaataataaattataattaatttaagtaagataaaaaataattaaaaactaaaatgttaaaattttaaaaaaattattttaaataatatttaaaaacattaaaaatcattttaaaaaatttatttatagaacaattaaataaatatttcagctaataaaaaacaaaagcttacctagccttagaagacaacttgtccaacaattagatgatacccattgcccttacgttttctttaacatcaattattgtttttgtcaacaagctatcttttagttttattttattggtaaaaaatatgtcgccttcaagttgcatcatttaacacatctcgtcattagaaaaataaaactcttccctaaacgattagtagaaaaaatcattcgataataaataagaaagaaaaattagaaaaaaataacttcattttaaaaaaatcattaaggctatattttttaaatgactaattttatatagactgtaactaaaagtatacaatttattatgctatgtatcttaaagaattacttataaaaatctacggaagaatatcttacaaagtgaaaaacaaatgagaaagaatttagtgggatgattatgattttatttgaaaattgaaaaaataattattaaagactttagtggagtaagaaagctttcctattagtcttttcttatccataaaaaaaaaaaaaaaaatctagcgtgacagcttttccatagattttaataatgtaaaatactggtagcagccgaccgttcaggtaatggacactgtggtcctaacttgcaacgggtgcgggcccaatttaataacgccgtggtaacggataaagccaagcgtgaagcggtgaaggtacatctctgactccgtcaagattacgaaaccgtcaactacgaaggactccccgaaatatcatctgtgtcataaacaccaagtcacaccatacatgggcacgcgtcacaatatgattggagaacggttccaccgcatatgctataaaatgcccccacacccctcgaccctaatcgcacttcaattgcaatcaaattagttcattctctttgcgcagttccctacctctcctttcaaggttcgtagatttcttccgtttttttttcttcttctttattgtttgttctacatcagcatgatgttgatttgattgtgttttctatcgtttcatcgattataaattttcataatcagaagattcagcttttattaatgcaagaacgtccttaattgatgattttataaccgtaaattaggtctaattagagtttttttcataaagattttcagatccgtttacaacaagccttaattgttgattctgtagtcgtagattaaggtttttttcatgaactacttcagatccgttaaacaacagccttatttgttgatacttcagtcgtttttcaagaaattgttcagatccgttgataaaagccttattcgttgattctgtatggtatttcaagagatattgctcaggtcctttagcaactaccttatttgttgattctgtggccatagattaggattttttttcacgaaattgcttcttgaaattacgtgatggattttgattctgatttatcttgtgattgttgactctacagccatggctgcaactactcttacatctgctttacctggtgctttcagttcatcccagagaccaagtgctcctttcaacttacaaagatcacctagagtgcttagaaggttcaacagaaagacaggacgtcaacctcgtggacttgttcgtgctgcaaaggctcaagcggcgcaaaacctgccagagaaattcgatgaaacaagactctgggaggccctcaggggatttggggttagtccaagtagggttacttacgctcccgtcggattcggagattaccactggaccgtcacagatgaagacgggagaccttggttcgcaactgtcagtgacctcgaacacaaagagcattgcgggcagggagcacaagcagcccttaaaggactcagacaagctatggacactgccctcgcacttagagatagggacggactcagattcgtggttgctccagtggcagcaacagatgggggtggccctgtccttccccttgacgctaggtatgcactcacagtcttccctcacgtcccaggaagaacaggagagttcggacaaagactcacagaggcagagagggacagactgcttgctcttctggcagaactccacggaagaacacctcctgaaacaaccccaccagccgatatggaaccaccaggacttcctggtgttagagcagcactcgccgaaagtgaaggaccttggagtggaggaccatttgcagaacccgctagacttcttctcagagaacacgaggccacactgcacgcaagactcgctgaattcgaagccctcgtcgcaagagttaagggtcgtggagcacctcttgtcgttacccacggagaaccacacccaggcaacttgatcctcggagaggaaggctatctcctcgtggactgggatacagttggactggctccagctgaaagggatttgagtctcatctcagacgacccagctgacctcgcaagatacgcagagcttacaggaagaactccagacccagacgcactcgcactctatagactgcgttggagtctccttgatgtggctgagttcgtcgagtggttcagggctgaacaccaaagaacccaagacaccgagagtgcatggaaggggttcactgacacacttgggcaattggctgctggtggatcagctgcatagcaaacttatctctgttatgaatcagaagaagttcatgtctcgtttcatttaaaactttggtggtttgtgttttggggccttgtaaagcccctgatgaataattgttcaactatgtttccgttcctgtgttatacctttctttctaatgagtaatgacatcaaacttcttctgtattgaaattatgtccttgtgagtctctttatcatcgtttcgtctttacattatatgtgctacttttgtctaatgagcctgaaaagtggctccaatggtacgcactggaagatttgttggcttctggtagatatagcgacagtgttgagcttgtaatatcatgtctcttattgctaaattagttcctttcttaacagaaaccttcaaagtttttgtttttgttttcatttacctaatgtacacatacgctggccatgactaacaacatgtccaggcttagagcatatttttttctagcttaaattgttaacttgtcattcagtaaaatccgagaattgtgaagctctaattgaagctaattcgttttataaagtcagttaaaaagtatactaaattatccaacttttcttcaaaatctcaaaattctatgacaaaacgatagtctttgtttatgtcagtaccacaaagaggtggaaaaaaacaccaaaaaaacaataagcaaactatacactgagaagaaaaataaaagagagctcaatagatgttttatactaacggtagattagatcaaagatccaagctttactctacatagagcagaacccagaatcccttcatatctcttttattctagcaccgataatctactgaaaagaagacacttagagctctgtctctttgtcaaagaagtcccagccgtcatccagaagctccttacgttcattaacagaggccgcaattggatcgggtttacttattttgtgggtatctatacttttattagatttttaatcaggctcctgatttctttttatttcgattgaattcctgaacttgtattattcagtagatcgaataaattataaaaagataaaatcataaaataatattttatcctatcaatcatattaaagcaatgaatatgtaaaattaatcttatctttattttaaaaaatcatataggtttagtatttttttaaaaataaagataggattagttttactattcactgcttattacttttaaaaaaatcataaaggtttagtatttttttaaaataaatataggaatagttttactattcactgctttaatagaaaaatagtttaaaatttaagatagttttaatcccagcatttgccacgtttgaacgtgagccgaaacgatgtcgttacattatcttaacctagctgaaacgatgtcgtcataatatcgccaaatgccaactggactacgtcgaacccacaaatcccacaaagcgcgtgaaatcaaatcgctcaaaccacaaaaaagaacaacgcgtttgttacacgctcaatcccacgcgagtagagcacagtaaccttcaaataagcgaatggggcataatcagaaatccgaaataaacctaggggcattatcggaaatgaaaagtagctcactcaatataaaaatctaggaaccctagttttcgttatcactctgtgctccctcgctctatttctcagtctctgtgtttgcggctgaggattccgaacgagtgaccttcttcgtttctcgcaaaggtaacagcctctgctcttgtctcttcgattcgatctatgcctgtctcttatttacgatgatgtttcttcggttatgtttttttatttatgctttatgctgttgatgttcggttgtttgtttcgctttgtttttgtggttcagttttttaggattcttttggtttttgaatcgattaatcggaagagattttcgagttatttggtgtgttggaggtgaatcttttttttgaggtcatagatctgttgtatttgtgttataaacatgcgactttgtatgattttttacgaggttatgatgttctggttgttttattatgaatctgttgagacagaaccatgatttttgttgatgttcgtttacactattaaaggtttgttttaacaggattaaaagttttttaagcatgttgaaggagtcttgtagatatgtaaccgtcgatagtttttttgtgggtttgttcacatgttatcaagcttaatcttttactatgtatgcgaccatatctggatccagcaaaggcgattttttaattccttgtgaaacttttgtaatatgaagttgaaattttgttattggtaaactataaatgtgtgaagttggagtatacctttaccttcttatttggctttgtgatagtttaatttatatgtattttgagttctgacttgtatttctttgaattgattctagtttaagtaatcatggcctcctccgagaacgtcatcaccgagttcatgcgcttcaaggtgcgcatggagggcaccgtgaacggccacgagttcgagatcgagggcgagggcgagggccgcccctacgagggccacaacaccgtgaagctgaaggtgacgaagggcggccccctgcccttcgcctgggacatcctgtccccccagttccagtacggctccaaggtgtacgtgaagcaccccgccgacatccccgactacaagaagctgtccttccccgagggcttcaagtgggagcgcgtgatgaacttcgaggacggcggcgtggcgaccgtgacccaggactcctccctgcaggacggctgcttcatctacaaggtgaagttcatcggcgtgaacttcccctccgacggccccgtgatgcagaagaagaccatgggctgggaggcctccaccgagcgcctgtacccccgcgacggcgtgctgaagggcgagacccacaaggccctgaagctgaaggacggcggccactacctggtggagttcaagtccatctacatggccaagaagcccgtgcagctgcccggctactactacgtggacgccaagctggacatcacctcccacaacgaggactacaccatcgtggagcagtacgagcgcaccgagggccgccaccacctgttcctgtagttttgtgatctgatgataagtggttggttcgtgtctcatgcacttgggaggtgatctatttcacctggtgtagtttgtgtttccgtcagttggaaaaacttatccctatcgatttcgttttcattttctgcttttcttttatgtaccttcgtttgggcttgtaacgggcctttgtatttcaactctcaataataatccaagtgcatgttaaacaatttgtcatctgtttcggctttgatatactactggtgaagatgggccgtactactgcatcacaacgaaaaataataataagatgaaaaacttgaagtggaaaaaaaaaaaaacttgaatgttcactactactcattgaccataatgtttaacatacatagctcaatagtatttttgtgaatatggcaacacaaacagtccaaaacaattgtctcttactataccaaaccaagggcgccgcttgtttgccactctttgtgtgcaatagtgtgattaccacatctccacattcaatatattccctgaattatctgacgattttgatggctcactgttttcccaagtcttgaattgtcttctgtgcgccagtcaaatgcatatgtgttgagtttatcttttaaatatcaagcttttgtttttaacttttgtttgtaaccaaaaactcacagtaggagtttgatcacataattttatgtttgcctttgcaatttctagtgagtctttgattaaaagcttgaaaagaaaatgcagccaagcttaccaagtaagttatgtgtattaaccagaggaagagagaatcttgcaaaatttcaacaaacacaaaaagaagtattactacgattggtggagaaagaaaacgattccaaatcttgaactgttgttgtaaaagcatagcagaaagtgggagacaaccgaaatagaaatgactataacttaatttaatgttatcattataatttcttctagcaaatatttagaaagtaaatatcacatcaacctttaatgtaattaagctttctctttttgattcatgtgagatgaaaagaaaaaaaagaagagaaaagtgtagaaaacacatcatttctaagctgaagctgaggtacaaattaattaataagtgactagggtcacgtgaccctagtcacttatgattccgatgacttcgtaggttcctagctcaagccgctcgtgtccaagcgtcacttacgattagctaatgattacggcatctaggaccgactagttcttatgtgcttctagtctccaaatgtggttgatagttattttgctctaagatcaacagtaatgaagtataaatcatcgttgtggtgtgctactcggttaattgagcattaacacacacaaacatgacgaggatggtataatctccaaaaatgtgtactttgttaggtgggaccctatagccttgattaatgtgctatgttaggcatgcctggaaacgtgtgacgcatatgttttgtgaacctgttgatattatatgtgcttttatattaccatattttattaaaatactaatatttattactagtaagatataacattctatctagcttaaaaactaaccataaatattccataataactagatttaccaaactaatatactaaatatacataataaatacaaaattaacaagacaataatcaatatttatgagcttaatatatttagacattatggttggtcgacgataatcatgctaacttttcgtaattgcttgattgaaatatgcttagaataatgcctctttgttctacatggcaaatagggaccattatggtgtaacaccctgggaaccacaaacaccccgaaatgctactaaactacacaactaaccttcatatataaaatttcgacagcatctcctttgaaaatttgcatagacgtggaagcaacagagtataaacagatctagctagctaagtttaaacggccggccaaacgtgcaagcgctactagacaattcagtacattaaaaacgtccgcaatgtgttattaagttgtctaagcgtcaatttatttacaattgaatatatcctgcca

SEQ ID NO: 167 - DNA, 15349 bp, Artificial Sequence
  RV026525 T-DNA
caaacaaacatacacagcgatttattcacacgaacccgaattacaacggtatatatcctgtcagccaacaccaaaacatcaaaaaaatcgggatcaggatcaggatctgcggccgcatcctgcaggtttaaacggccggccttcactagctagctgctaagctcaaacgagcaggaagcaacgagagggtggcgcgcgaccgacgtgcgtacgtagcatgagcctgagtggagacgttggacgtgtatgtatatacctctctgcgtgttaactatgtacgtaagcggcaggcagtgcaataagtgtggctctgtagtatgtacgtgcgggtacgatgctgtaagctactgaggcaagtccataaataaataatgacacgtgcgtgttctataatctcttcgcttcttcatttgtccccttgcggagtttggcatccattgatgccgttacgctgagaacagacacagcagacgaaccaaaagtgagttcttgtatgaaactatgacccttcatcgctaggctcaaacagcaccccgtacgaacacagcaaattagtcatctaactattagcccctacatgtttcagacgatacataaatatagcccatccttagcaattagctattggccctgcccatcccaagcaatgatctcgaagtatttttaatatatagtatttttaatatgtagcttttaaaattagaagataattttgagacaaaaatctccaagtatttttttgggtattttttactgcctccgtttttctttatttctcgtcacctagtttaattttgtgctaatcggctataaacgaaacagagagaaaagttactctaaaagcaactccaacagattagatataaatcttatatcctgcctagagctgttaaaaagatagacaactttagtggattagtgtatgcaacaaactctccaaatttaagtatcccaactacccaacgcatatcgttcccttttcattggcgcacgaactttcacctgctatagccgacgtacatgttcgttttttttgggcggcgcttactttcttccccgttcgttctcagcatcgcaactcaatttgttatggcggagaagcccttgtatcccaggtagtaatgcacagatatgcattattattattcataaaatcgagctagttaccctatgaggtgacatgaagcgctcacggttactatgacggttagcttcacgactgttggtggcagtagcgtacgacttagctatagttccggacttacctaactgactagagtcacacttagctgaccctagtcacttaggcgcgccaagcttggatctcctgcaggatctggccggccggatgggcggatctcgtacctcaactttgtatagaaaagttgggccagaatggcccggaccgggttaccaagcggccgcgaattccagaagaccaaagggcaattgagacttttcaacaaagggtaatatcgggaaacctcctcggattccattgcccagctatctgtcacttcatcaaaaggacagtagaaaaggaaggtggcacctacaaatgccatcattgcgataaaggaaaggctatcgttcaagatgcctctgccgacagtggtcccaaagatggacccccacccacgaggagcatcgtggaaaaagaagacgttccaaccacgtcttcaaagcaagtggattgatgtgatatctccactgacgtaagggatgacgcacaatcccactatccttcgcaagacccttcctctatataaggaagttcatttcatttggagaggacccatggaatctgctgaaagaatcggttcttacgatgtttacagacaaccatcttctaccagatggaacccaacctctgaacaactttctatccttagagaactttactacaccaacggtatcagatctccaaccgttgatgaaatccatagaatctctatgaagctttctagatacggtaagatcgaaggtaagaacgttttttactggtttcaaaaccataaggctagacatagacaaaagaccagactttctgctatgaacgttggtaagccagctgcttctccagctctttctcaaaccaccagaaagcataagcaatgctacatcaccaccaacatcgttcttacccttaaccaacattgctacaccaagaccaacatggttcttcaaatcatctggtctcttggtcttggtaacaagtctcaaaccaccaagatggtttgggaaatcaagatcaccgcttttccaaccatccataccgaatctttttacgaaaacagaatggctggtgaaaactcttcttgcaaggaagctgcttgctgctctcttgaacaaatgtacgctgttaagcatcatgatgttatgaaggctatggaagaaaaccaacttcaagaaggtaagatcaacagacatgttgaaacccttgaactttttccaacccattgcgaagatagatctccagaaccatctgaaaagaagtcttgctgctggggttcttgcgaaaccaaggaaaaccataacaacaacccaccaggtggttacaagggtaagcaaagagattctgttcttgatctttgcctttctcttggtaacaagtcttgcggtcttcatgataactaaggtacctgacatcttatagtctgcaacctctcgtgtctgaattcctatctttatcaagtgttattgcttccacgactataggacagctttcgtcgaaaggttttgctcatgtgatctcgaaggattcatctagtctgatttttcgtgacttgtatcggttttattggattcatccaacatatatcaataaaaaatgagttgtgtttcctttcttcctagttcagttaaaattatttccctcctgcgcttgtgctgtaattgtctgtgtacctgttgtttgtgactgtgttagttcccttggatatgatttcgtatttgatatgtacatggagatagcttagcttcattattggagtatgaagttagtatgacatagtcactctcctggaaaattgacactgcaaaccatatttttattctgaaccacaaatcctagtcagtccgctggcatatgccgtccgtttgctgaatccagaacgtgggtttggagatgtacggctgagatgcctctatgcgaaggggatttcgtggtgaaacgagatgggagtagagcaacgcccgtggaagatgcttcaaacttccacacttttgagcaacgatcggcagtagtaaggtagacgatttcaagatcaaagcatatgaagataaacaacatcaacaacaaaatttgttggggttctatagagagaaacagagctacatacatacactgttttgtatctaccatctgagatgatgaaaagatgaaaaactaaagaatgccccggcgccaacgccaggacacgccgcgcgcgcgtcacccgagccatctcttgacccagccggcgctgtatatttacacacgttgcagcatcgatcaccacctgttcgatcgcgtcgccgtcaccaagcttggcgcgccggtcacccggtccgggcctagaaggccacccggggctcggcgttaggcttttagtccgctaggtggctagaccgaggttaggacgctagttcactaggggcctagtggtgttttaaggatgggcaagtttgtacaaaaaagcaggctggcgccggaaccaattcagtcgagtgcggccgccagtgtgatggatatctcgacccgggtgattgcggttacatcatgtacggaaaaataattctaatccttgatttaaatttgaacttgactatttatttattctttatttcattttgtaaatcattttatgtatctcctggcaagcaattttatccaccttgcaccaacaccttcgggttccataatcaaaccaccttaacttcacaccatgctgtaactcacaccgcccagcatctccaatgtgaaagaagctaaaatttaataaacaatcatacgaagcagtgacaaaataccagatggtattaatgcttcgataaaattaattggaaagtataaaatggtagaaaataataaattataattaatttaagtaagataaaaaataattaaaaactaaaatgttaaaattttaaaaaaattattttaaataatatttaaaaacattaaaaatcattttaaaaaatttatttatagaacaattaaataaatatttcagctaataaaaaacaaaagcttacctagccttagaagacaacttgtccaacaattagatgatacccattgcccttacgttttctttaacatcaattattgtttttgtcaacaagctatcttttagttttattttattggtaaaaaatatgtcgccttcaagttgcatcatttaacacatctcgtcattagaaaaataaaactcttccctaaacgattagtagaaaaaatcattcgataataaataagaaagaaaaattagaaaaaaataacttcattttaaaaaaatcattaaggctatattttttaaatgactaattttatatagactgtaactaaaagtatacaatttattatgctatgtatcttaaagaattacttataaaaatctacggaagaatatcttacaaagtgaaaaacaaatgagaaagaatttagtgggatgattatgattttatttgaaaattgaaaaaataattattaaagactttagtggagtaagaaagctttcctattagtcttttcttatccataaaaaaaaaaaaaaaaatctagcgtgacagcttttccatagattttaataatgtaaaatactggtagcagccgaccgttcaggtaatggacactgtggtcctaacttgcaacgggtgcgggcccaatttaataacgccgtggtaacggataaagccaagcgtgaagcggtgaaggtacatctctgactccgtcaagattacgaaaccgtcaactacgaaggactccccgaaatatcatctgtgtcataaacaccaagtcacaccatacatgggcacgcgtcacaatatgattggagaacggttccaccgcatatgctataaaatgcccccacacccctcgaccctaatcgcacttcaattgcaatcaaattagttcattctctttgcgcagttccctacctctcctttcaaggttcgtagatttcttccgtttttttttcttcttctttattgtttgttctacatcagcatgatgttgatttgattgtgttttctatcgtttcatcgattataaattttcataatcagaagattcagcttttattaatgcaagaacgtccttaattgatgattttataaccgtaaattaggtctaattagagtttttttcataaagattttcagatccgtttacaacaagccttaattgttgattctgtagtcgtagattaaggtttttttcatgaactacttcagatccgttaaacaacagccttatttgttgatacttcagtcgtttttcaagaaattgttcagatccgttgataaaagccttattcgttgattctgtatggtatttcaagagatattgctcaggtcctttagcaactaccttatttgttgattctgtggccatagattaggattttttttcacgaaattgcttcttgaaattacgtgatggattttgattctgatttatcttgtgattgttgactctacagccatggcccacagcaagcacggcctgaaggaggagatgaccatgaagtaccacatggagggctgcgtgaacggccacaagttcgtgatcaccggcgagggcatcggctaccccttcaagggcaagcagaccatcaacctgtgcgtgatcgagggcggccccctgcccttcagcgaggacatcctgagcgccggcttcaagtacggcgaccggatcttcaccgagtacccccaggacatcgtggactacttcaagaacagctgccccgccggctacacctggggccggagcttcctgttcgaggacggcgccgtgtgcatctgtaacgtggacatcaccgtgagcgtgaaggagaactgcatctaccacaagagcatcttcaacggcgtgaacttccccgccgacggccccgtgatgaagaagatgaccaccaactgggaggccagctgcgagaagatcatgcccgtgcctaagcagggcatcctgaagggcgacgtgagcatgtacctgctgctgaaggacggcggccggtaccggtgccagttcgacaccgtgtacaaggccaagagcgtgcccagcaagatgcccgagtggcacttcatccagcacaagctgctgcgggaggaccggagcgacgccaagaaccagaagtggcagctgaccgagcacgccatcgccttccccagcgccctggcctgagagctcgaatttccccgatcgttcaaacatttggcaataaagtttcttaagattgaatcctgttgccggtcttgcgatgattatcatataatttctgttgaattacgttaagcatgtaataattaacatgtaatgcatgacgttatttatgagatgggtttttatgattagagtcccgcaattatacatttaatacgcgatagaaaacaaaatatagcgcgcaaactaggataaattatcgcgcgcggtgtcatctatgttactagatcgggaattctagtggccggcccagctgatatctagacccagctttcttgtacaaagtggccgttaacggatcggccagaatggcccggaccgggttaccgaattcgagctcggtaccctgggatccgatatcgatgggccctggccgaagcttggtcacccggtccgggcctagaaggccagcttcggccgccccgggcaactttattatacaaagttgatggtacggatccgtcgacggcgcgccgcggacctgaattccagcacactggcggccgttagtctaaaaacggcccctaactaacgcttagttgcccgctagattagtcccccgttagtgcctagttagacacacgacgaactaggggctactagtaacggccgccagtgtgctcggtacggccagaatggccatctggattcagcagggggtgattgcggttacatcatgtacggaaaaataattctaatccttgatttaaatttgaacttgactatttatttattctttatttcattttgtaaatcattttatgtatctcctggcaagcaattttatccaccttgcaccaacaccttcgggttccataatcaaaccaccttaacttcacaccatgctgtaactcacaccgcccagcatctccaatgtgaaagaagctaaaatttaataaacaatcatacgaagcagtgacaaaataccagatggtattaatgcttcgataaaattaattggaaagtataaaatggtagaaaataataaattataattaatttaagtaagataaaaaataattaaaaactaaaatgttaaaattttaaaaaaattattttaaataatatttaaaaacattaaaaatcattttaaaaaatttatttatagaacaattaaataaatatttcagctaataaaaaacaaaagcttacctagccttagaagacaacttgtccaacaattagatgatacccattgcccttacgttttctttaacatcaattattgtttttgtcaacaagctatcttttagttttattttattggtaaaaaatatgtcgccttcaagttgcatcatttaacacatctcgtcattagaaaaataaaactcttccctaaacgattagtagaaaaaatcattcgataataaataagaaagaaaaattagaaaaaaataacttcattttaaaaaaatcattaaggctatattttttaaatgactaattttatatagactgtaactaaaagtatacaatttattatgctatgtatcttaaagaattacttataaaaatctacggaagaatatcttacaaagtgaaaaacaaatgagaaagaatttagtgggatgattatgattttatttgaaaattgaaaaaataattattaaagactttagtggagtaagaaagctttcctattagtcttttcttatccataaaaaaaaaaaaaaaaatctagcgtgacagcttttccatagattttaataatgtaaaatactggtagcagccgaccgttcaggtaatggacactgtggtcctaacttgcaacgggtgcgggcccaatttaataacgccgtggtaacggataaagccaagcgtgaagcggtgaaggtacatctctgactccgtcaagattacgaaaccgtcaactacgaaggactccccgaaatatcatctgtgtcataaacaccaagtcacaccatacatgggcacgcgtcacaatatgattggagaacggttccaccgcatatgctataaaatgcccccacacccctcgaccctaatcgcacttcaattgcaatcaaattagttcattctctttgcgcagttccctacctctcctttcaaggttcgtagatttcttccgtttttttttcttcttctttattgtttgttctacatcagcatgatgttgatttgattgtgttttctatcgtttcatcgattataaattttcataatcagaagattcagcttttattaatgcaagaacgtccttaattgatgattttataaccgtaaattaggtctaattagagtttttttcataaagattttcagatccgtttacaacaagccttaattgttgattctgtagtcgtagattaaggtttttttcatgaactacttcagatccgttaaacaacagccttatttgttgatacttcagtcgtttttcaagaaattgttcagatccgttgataaaagccttattcgttgattctgtatggtatttcaagagatattgctcaggtcctttagcaactaccttatttgttgattctgtggccatagattaggattttttttcacgaaattgcttcttgaaattacgtgatggattttgattctgatttatcttgtgattgttgactctacagccatggctgcaactactcttacatctgctttacctggtgctttcagttcatcccagagaccaagtgctcctttcaacttacaaagatcacctagagtgcttagaaggttcaacagaaagacaggacgtcaacctcgtggacttgttcgtgctgcaaaggctcaagcggcgcaaaacctgccagagaaattcgatgaaacaagactctgggaggccctcaggggatttggggttagtccaagtagggttacttacgctcccgtcggattcggagattaccactggaccgtcacagatgaagacgggagaccttggttcgcaactgtcagtgacctcgaacacaaagagcattgcgggcagggagcacaagcagcccttaaaggactcagacaagctatggacactgccctcgcacttagagatagggacggactcagattcgtggttgctccagtggcagcaacagatgggggtggccctgtccttccccttgacgctaggtatgcactcacagtcttccctcacgtcccaggaagaacaggagagttcggacaaagactcacagaggcagagagggacagactgcttgctcttctggcagaactccacggaagaacacctcctgaaacaaccccaccagccgatatggaaccaccaggacttcctggtgttagagcagcactcgccgaaagtgaaggaccttggagtggaggaccatttgcagaacccgctagacttcttctcagagaacacgaggccacactgcacgcaagactcgctgaattcgaagccctcgtcgcaagagttaagggtcgtggagcacctcttgtcgttacccacggagaaccacacccaggcaacttgatcctcggagaggaaggctatctcctcgtggactgggatacagttggactggctccagctgaaagggatttgagtctcatctcagacgacccagctgacctcgcaagatacgcagagcttacaggaagaactccagacccagacgcactcgcactctatagactgcgttggagtctccttgatgtggctgagttcgtcgagtggttcagggctgaacaccaaagaacccaagacaccgagagtgcatggaaggggttcactgacacacttgggcaattggctgctggtggatcagctgcatagcaaacttatctctgttatgaatcagaagaagttcatgtctcgtttcatttaaaactttggtggtttgtgttttggggccttgtaaagcccctgatgaataattgttcaactatgtttccgttcctgtgttatacctttctttctaatgagtaatgacatcaaacttcttctgtattgaaattatgtccttgtgagtctctttatcatcgtttcgtctttacattatatgtgctacttttgtctaatgagcctgaaaagtggctccaatggtacgcactggaagatttgttggcttctggtagatatagcgacagtgttgagcttgtaatatcatgtctcttattgctaaattagttcctttcttaacagaaaccttcaaagtttttgtttttgttttcatttacctaatgtacacatacgctggccatgactaacaacatgtccaggcttagagcatatttttttctagcttaaattgttaacttgtcattcagtaaaatccgagaattgtgaagctctaattgaagctaattcgttttataaagtcagttaaaaagtatactaaattatccaacttttcttcaaaatctcaaaattctatgacaaaacgatagtctttgtttatgtcagtaccacaaagaggtggaaaaaaacaccaaaaaaacaataagcaaactatacactgagaagaaaaataaaagagagctcaatagatgttttatactaacggtagattagatcaaagatccaagctttactctacatagagcagaacccagaatcccttcatatctcttttattctagcaccgataatctactgaaaagaagacacttagagctctgtctctttgtcaaagaagtcccagccgtcatccagaagctccttacgttcattaacagaggccgcaattggatcgggtttacttattttgtgggtatctatacttttattagatttttaatcaggctcctgatttctttttatttcgattgaattcctgaacttgtattattcagtagatcgaataaattataaaaagataaaatcataaaataatattttatcctatcaatcatattaaagcaatgaatatgtaaaattaatcttatctttattttaaaaaatcatataggtttagtatttttttaaaaataaagataggattagttttactattcactgcttattacttttaaaaaaatcataaaggtttagtatttttttaaaataaatataggaatagttttactattcactgctttaatagaaaaatagtttaaaatttaagatagttttaatcccagcatttgccacgtttgaacgtgagccgaaacgatgtcgttacattatcttaacctagctgaaacgatgtcgtcataatatcgccaaatgccaactggactacgtcgaacccacaaatcccacaaagcgcgtgaaatcaaatcgctcaaaccacaaaaaagaacaacgcgtttgttacacgctcaatcccacgcgagtagagcacagtaaccttcaaataagcgaatggggcataatcagaaatccgaaataaacctaggggcattatcggaaatgaaaagtagctcactcaatataaaaatctaggaaccctagttttcgttatcactctgtgctccctcgctctatttctcagtctctgtgtttgcggctgaggattccgaacgagtgaccttcttcgtttctcgcaaaggtaacagcctctgctcttgtctcttcgattcgatctatgcctgtctcttatttacgatgatgtttcttcggttatgtttttttatttatgctttatgctgttgatgttcggttgtttgtttcgctttgtttttgtggttcagttttttaggattcttttggtttttgaatcgattaatcggaagagattttcgagttatttggtgtgttggaggtgaatcttttttttgaggtcatagatctgttgtatttgtgttataaacatgcgactttgtatgattttttacgaggttatgatgttctggttgttttattatgaatctgttgagacagaaccatgatttttgttgatgttcgtttacactattaaaggtttgttttaacaggattaaaagttttttaagcatgttgaaggagtcttgtagatatgtaaccgtcgatagtttttttgtgggtttgttcacatgttatcaagcttaatcttttactatgtatgcgaccatatctggatccagcaaaggcgattttttaattccttgtgaaacttttgtaatatgaagttgaaattttgttattggtaaactataaatgtgtgaagttggagtatacctttaccttcttatttggctttgtgatagtttaatttatatgtattttgagttctgacttgtatttctttgaattgattctagtttaagtaatcatggcctcctccgagaacgtcatcaccgagttcatgcgcttcaaggtgcgcatggagggcaccgtgaacggccacgagttcgagatcgagggcgagggcgagggccgcccctacgagggccacaacaccgtgaagctgaaggtgacgaagggcggccccctgcccttcgcctgggacatcctgtccccccagttccagtacggctccaaggtgtacgtgaagcaccccgccgacatccccgactacaagaagctgtccttccccgagggcttcaagtgggagcgcgtgatgaacttcgaggacggcggcgtggcgaccgtgacccaggactcctccctgcaggacggctgcttcatctacaaggtgaagttcatcggcgtgaacttcccctccgacggccccgtgatgcagaagaagaccatgggctgggaggcctccaccgagcgcctgtacccccgcgacggcgtgctgaagggcgagacccacaaggccctgaagctgaaggacggcggccactacctggtggagttcaagtccatctacatggccaagaagcccgtgcagctgcccggctactactacgtggacgccaagctggacatcacctcccacaacgaggactacaccatcgtggagcagtacgagcgcaccgagggccgccaccacctgttcctgtagttttgtgatctgatgataagtggttggttcgtgtctcatgcacttgggaggtgatctatttcacctggtgtagtttgtgtttccgtcagttggaaaaacttatccctatcgatttcgttttcattttctgcttttcttttatgtaccttcgtttgggcttgtaacgggcctttgtatttcaactctcaataataatccaagtgcatgttaaacaatttgtcatctgtttcggctttgatatactactggtgaagatgggccgtactactgcatcacaacgaaaaataataataagatgaaaaacttgaagtggaaaaaaaaaaaaacttgaatgttcactactactcattgaccataatgtttaacatacatagctcaatagtatttttgtgaatatggcaacacaaacagtccaaaacaattgtctcttactataccaaaccaagggcgccgcttgtttgccactctttgtgtgcaatagtgtgattaccacatctccacattcaatatattccctgaattatctgacgattttgatggctcactgttttcccaagtcttgaattgtcttctgtgcgccagtcaaatgcatatgtgttgagtttatcttttaaatatcaagcttttgtttttaacttttgtttgtaaccaaaaactcacagtaggagtttgatcacataattttatgtttgcctttgcaatttctagtgagtctttgattaaaagcttgaaaagaaaatgcagccaagcttaccaagtaagttatgtgtattaaccagaggaagagagaatcttgcaaaatttcaacaaacacaaaaagaagtattactacgattggtggagaaagaaaacgattccaaatcttgaactgttgttgtaaaagcatagcagaaagtgggagacaaccgaaatagaaatgactataacttaatttaatgttatcattataatttcttctagcaaatatttagaaagtaaatatcacatcaacctttaatgtaattaagctttctctttttgattcatgtgagatgaaaagaaaaaaaagaagagaaaagtgtagaaaacacatcatttctaagctgaagctgaggtacaaattaattaataagtgactagggtcacgtgaccctagtcacttatgattccgatgacttcgtaggttcctagctcaagccgctcgtgtccaagcgtcacttacgattagctaatgattacggcatctaggaccgactagttcttatgtgcttctagtctccaaatgtggttgatagttattttgctctaagatcaacagtaatgaagtataaatcatcgttgtggtgtgctactcggttaattgagcattaacacacacaaacatgacgaggatggtataatctccaaaaatgtgtactttgttaggtgggaccctatagccttgattaatgtgctatgttaggcatgcctggaaacgtgtgacgcatatgttttgtgaacctgttgatattatatgtgcttttatattaccatattttattaaaatactaatatttattactagtaagatataacattctatctagcttaaaaactaaccataaatattccataataactagatttaccaaactaatatactaaatatacataataaatacaaaattaacaagacaataatcaatatttatgagcttaatatatttagacattatggttggtcgacgataatcatgctaacttttcgtaattgcttgattgaaatatgcttagaataatgcctctttgttctacatggcaaatagggaccattatggtgtaacaccctgggaaccacaaacaccccgaaatgctactaaactacacaactaaccttcatatataaaatttcgacagcatctcctttgaaaatttgcatagacgtggaagcaacagagtataaacagatctagctagctaagtttaaacggccggccaaacgtgcaagcgctactagacaattcagtacattaaaaacgtccgcaatgtgttattaagttgtctaagcgtcaatttatttacaattgaatatatcctgcca

SEQ ID NO: 168 - DNA, 11996 bp, Artificial Sequence
  RV022814 T-DNA
caaacaaacatacacagcgatttattcacacgaacccgaattacaacggtatatatcctgtcagccaacaccaaaacatcaaaaaaatcgggatcaggatcaggatctgcggccgcatcctgcaggtttaaacggccggccttcactagctagctgctaagctcaaacgagcaggaagcaacgagagggtggcgcgcgaccgacgtgcgtacgtagcatgagcctgagtggagacgttggacgtgtatgtatatacctctctgcgtgttaactatgtacgtaagcggcaggcagtgcaataagtgtggctctgtagtatgtacgtgcgggtacgatgctgtaagctactgaggcaagtccataaataaataatgacacgtgcgtgttctataatctcttcgcttcttcatttgtccccttgcggagtttggcatccattgatgccgttacgctgagaacagacacagcagacgaaccaaaagtgagttcttgtatgaaactatgacccttcatcgctaggctcaaacagcaccccgtacgaacacagcaaattagtcatctaactattagcccctacatgtttcagacgatacataaatatagcccatccttagcaattagctattggccctgcccatcccaagcaatgatctcgaagtatttttaatatatagtatttttaatatgtagcttttaaaattagaagataattttgagacaaaaatctccaagtatttttttgggtattttttactgcctccgtttttctttatttctcgtcacctagtttaattttgtgctaatcggctataaacgaaacagagagaaaagttactctaaaagcaactccaacagattagatataaatcttatatcctgcctagagctgttaaaaagatagacaactttagtggattagtgtatgcaacaaactctccaaatttaagtatcccaactacccaacgcatatcgttcccttttcattggcgcacgaactttcacctgctatagccgacgtacatgttcgttttttttgggcggcgcttactttcttccccgttcgttctcagcatcgcaactcaatttgttatggcggagaagcccttgtatcccaggtagtaatgcacagatatgcattattattattcataaaatcgagctagttaccctatgaggtgacatgaagcgctcacggttactatgacggttagcttcacgactgttggtggcagtagcgtacgacttagctatagttccggacttacctaactgactagagtcacacttagctgaccctagtcacttaggcgcgccaagcttggatctcctgcaggatctggccggccggatgggcggatctcgtacctcaactttgtatagaaaagttgaacgagaaacgtaaaatgatataaatatcaatatattaaattagattttgcataaaaaacagactacataatactgtaaaacacaacatatccagtcactatggtcgaccgacagccttccaaatgttcttctcaaacggaatcgtcgtatccagcctactcgctattgtcctcaatgccgtattaaatcataaaaagaaataagaaaaagaggtgcgagcctcttttttgtgtgacaaaataaaaacatctacctattcatatacgctagtgtcatagtcctgaaaatcatctgcatcaagaacaatttcacaactcttatacttttctcttacaagtcgttcggcttcatctggattttcagcctctatacttactaaacgtgataaagtttctgtaatttctactgtatcgacctgcagactggctgtgtataagggagcctgacatttatattccccagaacatcaggttaatggcgtttttgatgtcattttcgcggtggctgagatcagccacttcttccccgataacggagaccggcacactggccatatcggtggtcatcatgcgccagctttcatccccgatatgcaccaccgggtaaagttcacgggagactttatctgacagcagacgtgcactggccagggggatcaccatccgtcgcccgggcgtgtcaataatatcactctgtacatccacaaacagacgataacggctctctcttttataggtgtaaaccttaaactgcatttcaccagcccctgttctcgtcagcaaaagagccgttcatttcaataaaccgggcgacctcagccatcccttcctgattttccgctttccagcgttcggcacgcagacgacgggcttcattctgcatggttgtgcttaccagaccggagatattgacatcatatatgccttgagcaactgatagctgtcgctgtcaactgtcactgtaatacgctgcttcatagcatacctctttttgacatacttcgggtatacatatcagtatatattcttataccgcaaaaatcagcgcgcaaatacgcatactgttatctggcttttagtaagccggatccacgcggcgtttacgccccccctgccactcatcgcagtactgttgtaattcattaagcattctgccgacatggaagccatcacaaacggcatgatgaacctgaatcgccagcggcatcagcaccttgtcgccttgcgtataatatttgcccatggtgaaaacgggggcgaagaagttgtccatattggccacgtttaaatcaaaactggtgaaactcacccagggattggctgagacgaaaaacatattctcaataaaccctttagggaaataggccaggttttcaccgtaacacgccacatcttgcgaatatatgtgtagaaactgccggaaatcgtcgtggtattcactccagagcgatgaaaacgtttcagtttgctcatggaaaacggtgtaacaagggtgaacactatcccatatcaccagctcaccgtctttcattgccatacggaattccggatgagcattcatcaggcgggcaagaatgtgaataaaggccggataaaacttgtgcttatttttctttacggtctttaaaaaggccgtaatatccagctgaacggtctggttataggtacattgagcaactgactgaaatgcctcaaaatgttctttacgatgccattgggatatatcaacggtggtatatccagtgatttttttctccattttagcttccttagctcctgaaaatctcgataactcaaaaaatacgcccggtagtgatcttatttcattatggtgaaagttggaacctcttacgtgccgatcaacgtctcattttcgccaaaagttggcccagggcttcccggtatcaacagggacaccaggatttatttattctgcgaagtgatcttccgtcacaggtatttattcggcgcaaagtgcgtcgggtgatgctgccaacttacggccgccatagtgactggatatgttgtgttttacagtattatgtagtctgttttttatgcaaaatctaatttaatatattgatatttatatcattttacgtttctcgttcaactttattatacaaagttgatggtacggatccgtcgacggcgcgccgcggacctgaattccagcacactggcggccgttagtctaaaaacggcccctaactaacgcttagttgcccgctagattagtcccccgttagtgcctagttagacacacgacgaactaggggctactagtaacggccgccagtgtgctcggtacggccagaatggccatctggattcagcagggggtgattgcggttacatcatgtacggaaaaataattctaatccttgatttaaatttgaacttgactatttatttattctttatttcattttgtaaatcattttatgtatctcctggcaagcaattttatccaccttgcaccaacaccttcgggttccataatcaaaccaccttaacttcacaccatgctgtaactcacaccgcccagcatctccaatgtgaaagaagctaaaatttaataaacaatcatacgaagcagtgacaaaataccagatggtattaatgcttcgataaaattaattggaaagtataaaatggtagaaaataataaattataattaatttaagtaagataaaaaataattaaaaactaaaatgttaaaattttaaaaaaattattttaaataatatttaaaaacattaaaaatcattttaaaaaatttatttatagaacaattaaataaatatttcagctaataaaaaacaaaagcttacctagccttagaagacaacttgtccaacaattagatgatacccattgcccttacgttttctttaacatcaattattgtttttgtcaacaagctatcttttagttttattttattggtaaaaaatatgtcgccttcaagttgcatcatttaacacatctcgtcattagaaaaataaaactcttccctaaacgattagtagaaaaaatcattcgataataaataagaaagaaaaattagaaaaaaataacttcattttaaaaaaatcattaaggctatattttttaaatgactaattttatatagactgtaactaaaagtatacaatttattatgctatgtatcttaaagaattacttataaaaatctacggaagaatatcttacaaagtgaaaaacaaatgagaaagaatttagtgggatgattatgattttatttgaaaattgaaaaaataattattaaagactttagtggagtaagaaagctttcctattagtcttttcttatccataaaaaaaaaaaaaaaaatctagcgtgacagcttttccatagattttaataatgtaaaatactggtagcagccgaccgttcaggtaatggacactgtggtcctaacttgcaacgggtgcgggcccaatttaataacgccgtggtaacggataaagccaagcgtgaagcggtgaaggtacatctctgactccgtcaagattacgaaaccgtcaactacgaaggactccccgaaatatcatctgtgtcataaacaccaagtcacaccatacatgggcacgcgtcacaatatgattggagaacggttccaccgcatatgctataaaatgcccccacacccctcgaccctaatcgcacttcaattgcaatcaaattagttcattctctttgcgcagttccctacctctcctttcaaggttcgtagatttcttccgtttttttttcttcttctttattgtttgttctacatcagcatgatgttgatttgattgtgttttctatcgtttcatcgattataaattttcataatcagaagattcagcttttattaatgcaagaacgtccttaattgatgattttataaccgtaaattaggtctaattagagtttttttcataaagattttcagatccgtttacaacaagccttaattgttgattctgtagtcgtagattaaggtttttttcatgaactacttcagatccgttaaacaacagccttatttgttgatacttcagtcgtttttcaagaaattgttcagatccgttgataaaagccttattcgttgattctgtatggtatttcaagagatattgctcaggtcctttagcaactaccttatttgttgattctgtggccatagattaggattttttttcacgaaattgcttcttgaaattacgtgatggattttgattctgatttatcttgtgattgttgactctacagccatggctgcaactactcttacatctgctttacctggtgctttcagttcatcccagagaccaagtgctcctttcaacttacaaagatcacctagagtgcttagaaggttcaacagaaagacaggacgtcaacctcgtggacttgttcgtgctgcaaaggctcaagcggcgcaaaacctgccagagaaattcgatgaaacaagactctgggaggccctcaggggatttggggttagtccaagtagggttacttacgctcccgtcggattcggagattaccactggaccgtcacagatgaagacgggagaccttggttcgcaactgtcagtgacctcgaacacaaagagcattgcgggcagggagcacaagcagcccttaaaggactcagacaagctatggacactgccctcgcacttagagatagggacggactcagattcgtggttgctccagtggcagcaacagatgggggtggccctgtccttccccttgacgctaggtatgcactcacagtcttccctcacgtcccaggaagaacaggagagttcggacaaagactcacagaggcagagagggacagactgcttgctcttctggcagaactccacggaagaacacctcctgaaacaaccccaccagccgatatggaaccaccaggacttcctggtgttagagcagcactcgccgaaagtgaaggaccttggagtggaggaccatttgcagaacccgctagacttcttctcagagaacacgaggccacactgcacgcaagactcgctgaattcgaagccctcgtcgcaagagttaagggtcgtggagcacctcttgtcgttacccacggagaaccacacccaggcaacttgatcctcggagaggaaggctatctcctcgtggactgggatacagttggactggctccagctgaaagggatttgagtctcatctcagacgacccagctgacctcgcaagatacgcagagcttacaggaagaactccagacccagacgcactcgcactctatagactgcgttggagtctccttgatgtggctgagttcgtcgagtggttcagggctgaacaccaaagaacccaagacaccgagagtgcatggaaggggttcactgacacacttgggcaattggctgctggtggatcagctgcatagcaaacttatctctgttatgaatcagaagaagttcatgtctcgtttcatttaaaactttggtggtttgtgttttggggccttgtaaagcccctgatgaataattgttcaactatgtttccgttcctgtgttatacctttctttctaatgagtaatgacatcaaacttcttctgtattgaaattatgtccttgtgagtctctttatcatcgtttcgtctttacattatatgtgctacttttgtctaatgagcctgaaaagtggctccaatggtacgcactggaagatttgttggcttctggtagatatagcgacagtgttgagcttgtaatatcatgtctcttattgctaaattagttcctttcttaacagaaaccttcaaagtttttgtttttgttttcatttacctaatgtacacatacgctggccatgactaacaacatgtccaggcttagagcatatttttttctagcttaaattgttaacttgtcattcagtaaaatccgagaattgtgaagctctaattgaagctaattcgttttataaagtcagttaaaaagtatactaaattatccaacttttcttcaaaatctcaaaattctatgacaaaacgatagtctttgtttatgtcagtaccacaaagaggtggaaaaaaacaccaaaaaaacaataagcaaactatacactgagaagaaaaataaaagagagctcaatagatgttttatactaacggtagattagatcaaagatccaagctttactctacatagagcagaacccagaatcccttcatatctcttttattctagcaccgataatctactgaaaagaagacacttagagctctgtctctttgtcaaagaagtcccagccgtcatccagaagctccttacgttcattaacagaggccgcaattggatcgggtttacttattttgtgggtatctatacttttattagatttttaatcaggctcctgatttctttttatttcgattgaattcctgaacttgtattattcagtagatcgaataaattataaaaagataaaatcataaaataatattttatcctatcaatcatattaaagcaatgaatatgtaaaattaatcttatctttattttaaaaaatcatataggtttagtatttttttaaaaataaagataggattagttttactattcactgcttattacttttaaaaaaatcataaaggtttagtatttttttaaaataaatataggaatagttttactattcactgctttaatagaaaaatagtttaaaatttaagatagttttaatcccagcatttgccacgtttgaacgtgagccgaaacgatgtcgttacattatcttaacctagctgaaacgatgtcgtcataatatcgccaaatgccaactggactacgtcgaacccacaaatcccacaaagcgcgtgaaatcaaatcgctcaaaccacaaaaaagaacaacgcgtttgttacacgctcaatcccacgcgagtagagcacagtaaccttcaaataagcgaatggggcataatcagaaatccgaaataaacctaggggcattatcggaaatgaaaagtagctcactcaatataaaaatctaggaaccctagttttcgttatcactctgtgctccctcgctctatttctcagtctctgtgtttgcggctgaggattccgaacgagtgaccttcttcgtttctcgcaaaggtaacagcctctgctcttgtctcttcgattcgatctatgcctgtctcttatttacgatgatgtttcttcggttatgtttttttatttatgctttatgctgttgatgttcggttgtttgtttcgctttgtttttgtggttcagttttttaggattcttttggtttttgaatcgattaatcggaagagattttcgagttatttggtgtgttggaggtgaatcttttttttgaggtcatagatctgttgtatttgtgttataaacatgcgactttgtatgattttttacgaggttatgatgttctggttgttttattatgaatctgttgagacagaaccatgatttttgttgatgttcgtttacactattaaaggtttgttttaacaggattaaaagttttttaagcatgttgaaggagtcttgtagatatgtaaccgtcgatagtttttttgtgggtttgttcacatgttatcaagcttaatcttttactatgtatgcgaccatatctggatccagcaaaggcgattttttaattccttgtgaaacttttgtaatatgaagttgaaattttgttattggtaaactataaatgtgtgaagttggagtatacctttaccttcttatttggctttgtgatagtttaatttatatgtattttgagttctgacttgtatttctttgaattgattctagtttaagtaatcatggcctcctccgagaacgtcatcaccgagttcatgcgcttcaaggtgcgcatggagggcaccgtgaacggccacgagttcgagatcgagggcgagggcgagggccgcccctacgagggccacaacaccgtgaagctgaaggtgacgaagggcggccccctgcccttcgcctgggacatcctgtccccccagttccagtacggctccaaggtgtacgtgaagcaccccgccgacatccccgactacaagaagctgtccttccccgagggcttcaagtgggagcgcgtgatgaacttcgaggacggcggcgtggcgaccgtgacccaggactcctccctgcaggacggctgcttcatctacaaggtgaagttcatcggcgtgaacttcccctccgacggccccgtgatgcagaagaagaccatgggctgggaggcctccaccgagcgcctgtacccccgcgacggcgtgctgaagggcgagacccacaaggccctgaagctgaaggacggcggccactacctggtggagttcaagtccatctacatggccaagaagcccgtgcagctgcccggctactactacgtggacgccaagctggacatcacctcccacaacgaggactacaccatcgtggagcagtacgagcgcaccgagggccgccaccacctgttcctgtagttttgtgatctgatgataagtggttggttcgtgtctcatgcacttgggaggtgatctatttcacctggtgtagtttgtgtttccgtcagttggaaaaacttatccctatcgatttcgttttcattttctgcttttcttttatgtaccttcgtttgggcttgtaacgggcctttgtatttcaactctcaataataatccaagtgcatgttaaacaatttgtcatctgtttcggctttgatatactactggtgaagatgggccgtactactgcatcacaacgaaaaataataataagatgaaaaacttgaagtggaaaaaaaaaaaaacttgaatgttcactactactcattgaccataatgtttaacatacatagctcaatagtatttttgtgaatatggcaacacaaacagtccaaaacaattgtctcttactataccaaaccaagggcgccgcttgtttgccactctttgtgtgcaatagtgtgattaccacatctccacattcaatatattccctgaattatctgacgattttgatggctcactgttttcccaagtcttgaattgtcttctgtgcgccagtcaaatgcatatgtgttgagtttatcttttaaatatcaagcttttgtttttaacttttgtttgtaaccaaaaactcacagtaggagtttgatcacataattttatgtttgcctttgcaatttctagtgagtctttgattaaaagcttgaaaagaaaatgcagccaagcttaccaagtaagttatgtgtattaaccagaggaagagagaatcttgcaaaatttcaacaaacacaaaaagaagtattactacgattggtggagaaagaaaacgattccaaatcttgaactgttgttgtaaaagcatagcagaaagtgggagacaaccgaaatagaaatgactataacttaatttaatgttatcattataatttcttctagcaaatatttagaaagtaaatatcacatcaacctttaatgtaattaagctttctctttttgattcatgtgagatgaaaagaaaaaaaagaagagaaaagtgtagaaaacacatcatttctaagctgaagctgaggtacaaattaattaataagtgactagggtcacgtgaccctagtcacttatgattccgatgacttcgtaggttcctagctcaagccgctcgtgtccaagcgtcacttacgattagctaatgattacggcatctaggaccgactagttcttatgtgcttctagtctccaaatgtggttgatagttattttgctctaagatcaacagtaatgaagtataaatcatcgttgtggtgtgctactcggttaattgagcattaacacacacaaacatgacgaggatggtataatctccaaaaatgtgtactttgttaggtgggaccctatagccttgattaatgtgctatgttaggcatgcctggaaacgtgtgacgcatatgttttgtgaacctgttgatattatatgtgcttttatattaccatattttattaaaatactaatatttattactagtaagatataacattctatctagcttaaaaactaaccataaatattccataataactagatttaccaaactaatatactaaatatacataataaatacaaaattaacaagacaataatcaatatttatgagcttaatatatttagacattatggttggtcgacgataatcatgctaacttttcgtaattgcttgattgaaatatgcttagaataatgcctctttgttctacatggcaaatagggaccattatggtgtaacaccctgggaaccacaaacaccccgaaatgctactaaactacacaactaaccttcatatataaaatttcgacagcatctcctttgaaaatttgcatagacgtggaagcaacagagtataaacagatctagctagctaagtttaaacggccggccaaacgtgcaagcgctactagacaattcagtacattaaaaacgtccgcaatgtgttattaagttgtctaagcgtcaatttatttacaattgaatatatcctgcca

SEQ ID NO: 169 - DNA, 16534 bp, Artificial Sequence
  RV027344 T-DNA
caaacaaacatacacagcgatttattcacacgaacccgaattacaacggtatatatcctgtcagccaacaccaaaacatcaaaaaaatcgggatcaggatcaggatctgcggccgcatcctgcaggtttaaacggccggccttcactagctagctgctaagctcaaacgagcaggaagcaacgagagggtggcgcgcgaccgacgtgcgtacgtagcatgagcctgagtggagacgttggacgtgtatgtatatacctctctgcgtgttaactatgtacgtaagcggcaggcagtgcaataagtgtggctctgtagtatgtacgtgcgggtacgatgctgtaagctactgaggcaagtccataaataaataatgacacgtgcgtgttctataatctcttcgcttcttcatttgtccccttgcggagtttggcatccattgatgccgttacgctgagaacagacacagcagacgaaccaaaagtgagttcttgtatgaaactatgacccttcatcgctaggctcaaacagcaccccgtacgaacacagcaaattagtcatctaactattagcccctacatgtttcagacgatacataaatatagcccatccttagcaattagctattggccctgcccatcccaagcaatgatctcgaagtatttttaatatatagtatttttaatatgtagcttttaaaattagaagataattttgagacaaaaatctccaagtatttttttgggtattttttactgcctccgtttttctttatttctcgtcacctagtttaattttgtgctaatcggctataaacgaaacagagagaaaagttactctaaaagcaactccaacagattagatataaatcttatatcctgcctagagctgttaaaaagatagacaactttagtggattagtgtatgcaacaaactctccaaatttaagtatcccaactacccaacgcatatcgttcccttttcattggcgcacgaactttcacctgctatagccgacgtacatgttcgttttttttgggcggcgcttactttcttccccgttcgttctcagcatcgcaactcaatttgttatggcggagaagcccttgtatcccaggtagtaatgcacagatatgcattattattattcataaaatcgagctagttaccctatgaggtgacatgaagcgctcacggttactatgacggttagcttcacgactgttggtggcagtagcgtacgacttagctatagttccggacttacctaactgactagagtcacacttagctgaccctagtcacttaggcgcgccaagcttggatctcctgcaggatctggccggccggatgggcggatctcgtacctcaactttgtatagaaaagttgggccagaatggcccggaccgggttaccaagcggccgctattaaactaattaaacttagcctttttcattagttttgttactggaaacggttcgtctttagtgcacaaagaccaaggtcaatttaattctttaataaattcaattgagagatcagaagcttgtgaatctggttctctctctctcttctcttactagcttttgagtcgacaaaagagagagaaaagatcattaaactcgaatccaaaacttcaaccaacaaaagggaaaaaaagaaaaaataactacaaagagatctatctttagggtttcaaaactttcttgagtttcagatcgaattgagtaagtatttatattatttaagtgttcttcttactgtatcatttctgaccatacaccaaactagggtttcttaaagatcataactctctctctctcgcttcttcctacactagatctgtccgatagatctgatgctttgagaagtcttgtgactttcaagattgatttttctttttgtttgtttgtttatatgtacacatacttggagatagatatactctcatatatgttactgtgcatatggatggatccatcttaagtgtgaataaaaactacccaaatctcatttttgtttgtttcttatctcatttgttgtttttgtaaggccgtcattataaatctaaaacaatttatccgttttcgtaaagaaaatcgctttccaaaaaaaaaaactttgaagtaaaaatatcattttgggtctatattcaaatctctcctcatatttccatctcattatttgtaaaattaatatattaggtcattatcatattgattatagagtttatatgttatgttataaagtaaaagttatatatgtaaatattacgtttgtaatatatatatttatacatatgtacgtatacataatttgtatgtatatgtgcctcatttttaacaaatattatcgttaatctttagtttcattataattttttagggatgtatacattatataaatattttatgttatttatatctgaaatttctatactataacatcttagatagttttcatacgtaattaagagttttaattaatagttacataattatgattagatgaatttatctataaattgtatgcaaaaatatatacatatccaaccgaaaaaatggagagtaaacaaaaacctaacaattaatggtttagtacttgtgaaaatgataaaattattaatttaatatatagtttcataacagctagaaataactttcccttaatataattattttcttccatttccataatgattttcttcttcttcattctgtatacatatatgagcgtttcatatataatcttttactaattcgattgtgattttgattttgggcagtggaagatatacttggagaagaaaatcaaatcacgaaaatatattgatcagtgccttgaaggaaaccaaagttgacaactccaaaaatccatttcgttattaatatctaactgagtgatcatagtcaatcatccataacaccatggaaactcaacaacaacaagcagatattcaagattttgggaacaaaaacagtaacacctatgcatgcaggcaaagcagtactaggtggacacccacaagtgatcagatcagaatactgaaagagctctactacaacaatggaatcagatcaccaactgctgatcagattcagagaatcgctgctcaactcagacagtacggcaagattgaaggcaagaacgtgttttattggtttcagaaccataaagctcgtgaacgccagaagaaacggttcactcctactgctcctccaccaccgtctcacttctccgatcatattaaccaccatcttcccaacgctgcccccatgcagattccgtctcaccaccaccactaccaccatcaagaaccaccacatgtctatgctcaccctcacaaactctacaccactcatcacattggggttggttcttcttcacaaggagtgatgggtgtagggtgtggctatggatctgttgctatggagaagagtttcaggaagtgttcaatatcaccaccgggagagagtaaggccacaggaggaattggccggaatatcggttcaagatcacggataagtgtcgattcgtgttccttcttcgacacaattaagccaaagacatatgagatgtttgagaatcatgatcaagatgaagaacaaggagagccttcaactgagatcgaaacacttccattattcccgattcacgacggcaaccatcatgatttcttcggcatgaggacggcaaatctgcaattggagcaaggcactggaggttactacactggaggaagctggtatcggtctgatgagagggcgtctcttgagctcagtctcaactcatatggttattataactaattcgaactggccaggtacctgacatcttatagtctgcaacctctcgtgtctgaattcctatctttatcaagtgttattgcttccacgactataggacagctttcgtcgaaaggttttgctcatgtgatctcgaaggattcatctagtctgatttttcgtgacttgtatcggttttattggattcatccaacatatatcaataaaaaatgagttgtgtttcctttcttcctagttcagttaaaattatttccctcctgcgcttgtgctgtaattgtctgtgtacctgttgtttgtgactgtgttagttcccttggatatgatttcgtatttgatatgtacatggagatagcttagcttcattattggagtatgaagttagtatgacatagtcactctcctggaaaattgacactgcaaaccatatttttattctgaaccacaaatcctagtcagtccgctggcatatgccgtccgtttgctgaatccagaacgtgggtttggagatgtacggctgagatgcctctatgcgaaggggatttcgtggtgaaacgagatgggagtagagcaacgcccgtggaagatgcttcaaacttccacacttttgagcaacgatcggcagtagtaaggtagacgatttcaagatcaaagcatatgaagataaacaacatcaacaacaaaatttgttggggttctatagagagaaacagagctacatacatacactgttttgtatctaccatctgagatgatgaaaagatgaaaaactaaagaatgccccggcgccaacgccaggacacgccgcgcgcgcgtcacccgagccatctcttgacccagccggcgctgtatatttacacacgttgcagcatcgatcaccacctgttcgatcgcgtcgccgtcaccaagcttggcgcgccggtcacccggtccgggcctagaaggccacccggggctcggcgttaggcttttagtccgctaggtggctagaccgaggttaggacgctagttcactaggggcctagtggtgttttaaggatgggcaagtttgtacaaaaaagcaggctggcgccggaaccaattcagtcgagtgcggccgccagtgtgatggatatctcgacccgggtgattgcggttacatcatgtacggaaaaataattctaatccttgatttaaatttgaacttgactatttatttattctttatttcattttgtaaatcattttatgtatctcctggcaagcaattttatccaccttgcaccaacaccttcgggttccataatcaaaccaccttaacttcacaccatgctgtaactcacaccgcccagcatctccaatgtgaaagaagctaaaatttaataaacaatcatacgaagcagtgacaaaataccagatggtattaatgcttcgataaaattaattggaaagtataaaatggtagaaaataataaattataattaatttaagtaagataaaaaataattaaaaactaaaatgttaaaattttaaaaaaattattttaaataatatttaaaaacattaaaaatcattttaaaaaatttatttatagaacaattaaataaatatttcagctaataaaaaacaaaagcttacctagccttagaagacaacttgtccaacaattagatgatacccattgcccttacgttttctttaacatcaattattgtttttgtcaacaagctatcttttagttttattttattggtaaaaaatatgtcgccttcaagttgcatcatttaacacatctcgtcattagaaaaataaaactcttccctaaacgattagtagaaaaaatcattcgataataaataagaaagaaaaattagaaaaaaataacttcattttaaaaaaatcattaaggctatattttttaaatgactaattttatatagactgtaactaaaagtatacaatttattatgctatgtatcttaaagaattacttataaaaatctacggaagaatatcttacaaagtgaaaaacaaatgagaaagaatttagtgggatgattatgattttatttgaaaattgaaaaaataattattaaagactttagtggagtaagaaagctttcctattagtcttttcttatccataaaaaaaaaaaaaaaaatctagcgtgacagcttttccatagattttaataatgtaaaatactggtagcagccgaccgttcaggtaatggacactgtggtcctaacttgcaacgggtgcgggcccaatttaataacgccgtggtaacggataaagccaagcgtgaagcggtgaaggtacatctctgactccgtcaagattacgaaaccgtcaactacgaaggactccccgaaatatcatctgtgtcataaacaccaagtcacaccatacatgggcacgcgtcacaatatgattggagaacggttccaccgcatatgctataaaatgcccccacacccctcgaccctaatcgcacttcaattgcaatcaaattagttcattctctttgcgcagttccctacctctcctttcaaggttcgtagatttcttccgtttttttttcttcttctttattgtttgttctacatcagcatgatgttgatttgattgtgttttctatcgtttcatcgattataaattttcataatcagaagattcagcttttattaatgcaagaacgtccttaattgatgattttataaccgtaaattaggtctaattagagtttttttcataaagattttcagatccgtttacaacaagccttaattgttgattctgtagtcgtagattaaggtttttttcatgaactacttcagatccgttaaacaacagccttatttgttgatacttcagtcgtttttcaagaaattgttcagatccgttgataaaagccttattcgttgattctgtatggtatttcaagagatattgctcaggtcctttagcaactaccttatttgttgattctgtggccatagattaggattttttttcacgaaattgcttcttgaaattacgtgatggattttgattctgatttatcttgtgattgttgactctacagccatggcccacagcaagcacggcctgaaggaggagatgaccatgaagtaccacatggagggctgcgtgaacggccacaagttcgtgatcaccggcgagggcatcggctaccccttcaagggcaagcagaccatcaacctgtgcgtgatcgagggcggccccctgcccttcagcgaggacatcctgagcgccggcttcaagtacggcgaccggatcttcaccgagtacccccaggacatcgtggactacttcaagaacagctgccccgccggctacacctggggccggagcttcctgttcgaggacggcgccgtgtgcatctgtaacgtggacatcaccgtgagcgtgaaggagaactgcatctaccacaagagcatcttcaacggcgtgaacttccccgccgacggccccgtgatgaagaagatgaccaccaactgggaggccagctgcgagaagatcatgcccgtgcctaagcagggcatcctgaagggcgacgtgagcatgtacctgctgctgaaggacggcggccggtaccggtgccagttcgacaccgtgtacaaggccaagagcgtgcccagcaagatgcccgagtggcacttcatccagcacaagctgctgcgggaggaccggagcgacgccaagaaccagaagtggcagctgaccgagcacgccatcgccttccccagcgccctggcctgagagctcgaatttccccgatcgttcaaacatttggcaataaagtttcttaagattgaatcctgttgccggtcttgcgatgattatcatataatttctgttgaattacgttaagcatgtaataattaacatgtaatgcatgacgttatttatgagatgggtttttatgattagagtcccgcaattatacatttaatacgcgatagaaaacaaaatatagcgcgcaaactaggataaattatcgcgcgcggtgtcatctatgttactagatcgggaattctagtggccggcccagctgatatctagacccagctttcttgtacaaagtggccgttaacggatcggccagaatggcccggaccgggttaccgaattcgagctcggtaccctgggatccgatatcgatgggccctggccgaagcttggtcacccggtccgggcctagaaggccagcttcggccgccccgggcaactttattatacaaagttgatggtacggatccgtcgacggcgcgccgcggacctgaattccagcacactggcggccgttagtctaaaaacggcccctaactaacgcttagttgcccgctagattagtcccccgttagtgcctagttagacacacgacgaactaggggctactagtaacggccgccagtgtgctcggtacggccagaatggccatctggattcagcagggggtgattgcggttacatcatgtacggaaaaataattctaatccttgatttaaatttgaacttgactatttatttattctttatttcattttgtaaatcattttatgtatctcctggcaagcaattttatccaccttgcaccaacaccttcgggttccataatcaaaccaccttaacttcacaccatgctgtaactcacaccgcccagcatctccaatgtgaaagaagctaaaatttaataaacaatcatacgaagcagtgacaaaataccagatggtattaatgcttcgataaaattaattggaaagtataaaatggtagaaaataataaattataattaatttaagtaagataaaaaataattaaaaactaaaatgttaaaattttaaaaaaattattttaaataatatttaaaaacattaaaaatcattttaaaaaatttatttatagaacaattaaataaatatttcagctaataaaaaacaaaagcttacctagccttagaagacaacttgtccaacaattagatgatacccattgcccttacgttttctttaacatcaattattgtttttgtcaacaagctatcttttagttttattttattggtaaaaaatatgtcgccttcaagttgcatcatttaacacatctcgtcattagaaaaataaaactcttccctaaacgattagtagaaaaaatcattcgataataaataagaaagaaaaattagaaaaaaataacttcattttaaaaaaatcattaaggctatattttttaaatgactaattttatatagactgtaactaaaagtatacaatttattatgctatgtatcttaaagaattacttataaaaatctacggaagaatatcttacaaagtgaaaaacaaatgagaaagaatttagtgggatgattatgattttatttgaaaattgaaaaaataattattaaagactttagtggagtaagaaagctttcctattagtcttttcttatccataaaaaaaaaaaaaaaaatctagcgtgacagcttttccatagattttaataatgtaaaatactggtagcagccgaccgttcaggtaatggacactgtggtcctaacttgcaacgggtgcgggcccaatttaataacgccgtggtaacggataaagccaagcgtgaagcggtgaaggtacatctctgactccgtcaagattacgaaaccgtcaactacgaaggactccccgaaatatcatctgtgtcataaacaccaagtcacaccatacatgggcacgcgtcacaatatgattggagaacggttccaccgcatatgctataaaatgcccccacacccctcgaccctaatcgcacttcaattgcaatcaaattagttcattctctttgcgcagttccctacctctcctttcaaggttcgtagatttcttccgtttttttttcttcttctttattgtttgttctacatcagcatgatgttgatttgattgtgttttctatcgtttcatcgattataaattttcataatcagaagattcagcttttattaatgcaagaacgtccttaattgatgattttataaccgtaaattaggtctaattagagtttttttcataaagattttcagatccgtttacaacaagccttaattgttgattctgtagtcgtagattaaggtttttttcatgaactacttcagatccgttaaacaacagccttatttgttgatacttcagtcgtttttcaagaaattgttcagatccgttgataaaagccttattcgttgattctgtatggtatttcaagagatattgctcaggtcctttagcaactaccttatttgttgattctgtggccatagattaggattttttttcacgaaattgcttcttgaaattacgtgatggattttgattctgatttatcttgtgattgttgactctacagccatggctgcaactactcttacatctgctttacctggtgctttcagttcatcccagagaccaagtgctcctttcaacttacaaagatcacctagagtgcttagaaggttcaacagaaagacaggacgtcaacctcgtggacttgttcgtgctgcaaaggctcaagcggcgcaaaacctgccagagaaattcgatgaaacaagactctgggaggccctcaggggatttggggttagtccaagtagggttacttacgctcccgtcggattcggagattaccactggaccgtcacagatgaagacgggagaccttggttcgcaactgtcagtgacctcgaacacaaagagcattgcgggcagggagcacaagcagcccttaaaggactcagacaagctatggacactgccctcgcacttagagatagggacggactcagattcgtggttgctccagtggcagcaacagatgggggtggccctgtccttccccttgacgctaggtatgcactcacagtcttccctcacgtcccaggaagaacaggagagttcggacaaagactcacagaggcagagagggacagactgcttgctcttctggcagaactccacggaagaacacctcctgaaacaaccccaccagccgatatggaaccaccaggacttcctggtgttagagcagcactcgccgaaagtgaaggaccttggagtggaggaccatttgcagaacccgctagacttcttctcagagaacacgaggccacactgcacgcaagactcgctgaattcgaagccctcgtcgcaagagttaagggtcgtggagcacctcttgtcgttacccacggagaaccacacccaggcaacttgatcctcggagaggaaggctatctcctcgtggactgggatacagttggactggctccagctgaaagggatttgagtctcatctcagacgacccagctgacctcgcaagatacgcagagcttacaggaagaactccagacccagacgcactcgcactctatagactgcgttggagtctccttgatgtggctgagttcgtcgagtggttcagggctgaacaccaaagaacccaagacaccgagagtgcatggaaggggttcactgacacacttgggcaattggctgctggtggatcagctgcatagcaaacttatctctgttatgaatcagaagaagttcatgtctcgtttcatttaaaactttggtggtttgtgttttggggccttgtaaagcccctgatgaataattgttcaactatgtttccgttcctgtgttatacctttctttctaatgagtaatgacatcaaacttcttctgtattgaaattatgtccttgtgagtctctttatcatcgtttcgtctttacattatatgtgctacttttgtctaatgagcctgaaaagtggctccaatggtacgcactggaagatttgttggcttctggtagatatagcgacagtgttgagcttgtaatatcatgtctcttattgctaaattagttcctttcttaacagaaaccttcaaagtttttgtttttgttttcatttacctaatgtacacatacgctggccatgactaacaacatgtccaggcttagagcatatttttttctagcttaaattgttaacttgtcattcagtaaaatccgagaattgtgaagctctaattgaagctaattcgttttataaagtcagttaaaaagtatactaaattatccaacttttcttcaaaatctcaaaattctatgacaaaacgatagtctttgtttatgtcagtaccacaaagaggtggaaaaaaacaccaaaaaaacaataagcaaactatacactgagaagaaaaataaaagagagctcaatagatgttttatactaacggtagattagatcaaagatccaagctttactctacatagagcagaacccagaatcccttcatatctcttttattctagcaccgataatctactgaaaagaagacacttagagctctgtctctttgtcaaagaagtcccagccgtcatccagaagctccttacgttcattaacagaggccgcaattggatcgggtttacttattttgtgggtatctatacttttattagatttttaatcaggctcctgatttctttttatttcgattgaattcctgaacttgtattattcagtagatcgaataaattataaaaagataaaatcataaaataatattttatcctatcaatcatattaaagcaatgaatatgtaaaattaatcttatctttattttaaaaaatcatataggtttagtatttttttaaaaataaagataggattagttttactattcactgcttattacttttaaaaaaatcataaaggtttagtatttttttaaaataaatataggaatagttttactattcactgctttaatagaaaaatagtttaaaatttaagatagttttaatcccagcatttgccacgtttgaacgtgagccgaaacgatgtcgttacattatcttaacctagctgaaacgatgtcgtcataatatcgccaaatgccaactggactacgtcgaacccacaaatcccacaaagcgcgtgaaatcaaatcgctcaaaccacaaaaaagaacaacgcgtttgttacacgctcaatcccacgcgagtagagcacagtaaccttcaaataagcgaatggggcataatcagaaatccgaaataaacctaggggcattatcggaaatgaaaagtagctcactcaatataaaaatctaggaaccctagttttcgttatcactctgtgctccctcgctctatttctcagtctctgtgtttgcggctgaggattccgaacgagtgaccttcttcgtttctcgcaaaggtaacagcctctgctcttgtctcttcgattcgatctatgcctgtctcttatttacgatgatgtttcttcggttatgtttttttatttatgctttatgctgttgatgttcggttgtttgtttcgctttgtttttgtggttcagttttttaggattcttttggtttttgaatcgattaatcggaagagattttcgagttatttggtgtgttggaggtgaatcttttttttgaggtcatagatctgttgtatttgtgttataaacatgcgactttgtatgattttttacgaggttatgatgttctggttgttttattatgaatctgttgagacagaaccatgatttttgttgatgttcgtttacactattaaaggtttgttttaacaggattaaaagttttttaagcatgttgaaggagtcttgtagatatgtaaccgtcgatagtttttttgtgggtttgttcacatgttatcaagcttaatcttttactatgtatgcgaccatatctggatccagcaaaggcgattttttaattccttgtgaaacttttgtaatatgaagttgaaattttgttattggtaaactataaatgtgtgaagttggagtatacctttaccttcttatttggctttgtgatagtttaatttatatgtattttgagttctgacttgtatttctttgaattgattctagtttaagtaatcatggcctcctccgagaacgtcatcaccgagttcatgcgcttcaaggtgcgcatggagggcaccgtgaacggccacgagttcgagatcgagggcgagggcgagggccgcccctacgagggccacaacaccgtgaagctgaaggtgacgaagggcggccccctgcccttcgcctgggacatcctgtccccccagttccagtacggctccaaggtgtacgtgaagcaccccgccgacatccccgactacaagaagctgtccttccccgagggcttcaagtgggagcgcgtgatgaacttcgaggacggcggcgtggcgaccgtgacccaggactcctccctgcaggacggctgcttcatctacaaggtgaagttcatcggcgtgaacttcccctccgacggccccgtgatgcagaagaagaccatgggctgggaggcctccaccgagcgcctgtacccccgcgacggcgtgctgaagggcgagacccacaaggccctgaagctgaaggacggcggccactacctggtggagttcaagtccatctacatggccaagaagcccgtgcagctgcccggctactactacgtggacgccaagctggacatcacctcccacaacgaggactacaccatcgtggagcagtacgagcgcaccgagggccgccaccacctgttcctgtagttttgtgatctgatgataagtggttggttcgtgtctcatgcacttgggaggtgatctatttcacctggtgtagtttgtgtttccgtcagttggaaaaacttatccctatcgatttcgttttcattttctgcttttcttttatgtaccttcgtttgggcttgtaacgggcctttgtatttcaactctcaataataatccaagtgcatgttaaacaatttgtcatctgtttcggctttgatatactactggtgaagatgggccgtactactgcatcacaacgaaaaataataataagatgaaaaacttgaagtggaaaaaaaaaaaaacttgaatgttcactactactcattgaccataatgtttaacatacatagctcaatagtatttttgtgaatatggcaacacaaacagtccaaaacaattgtctcttactataccaaaccaagggcgccgcttgtttgccactctttgtgtgcaatagtgtgattaccacatctccacattcaatatattccctgaattatctgacgattttgatggctcactgttttcccaagtcttgaattgtcttctgtgcgccagtcaaatgcatatgtgttgagtttatcttttaaatatcaagcttttgtttttaacttttgtttgtaaccaaaaactcacagtaggagtttgatcacataattttatgtttgcctttgcaatttctagtgagtctttgattaaaagcttgaaaagaaaatgcagccaagcttaccaagtaagttatgtgtattaaccagaggaagagagaatcttgcaaaatttcaacaaacacaaaaagaagtattactacgattggtggagaaagaaaacgattccaaatcttgaactgttgttgtaaaagcatagcagaaagtgggagacaaccgaaatagaaatgactataacttaatttaatgttatcattataatttcttctagcaaatatttagaaagtaaatatcacatcaacctttaatgtaattaagctttctctttttgattcatgtgagatgaaaagaaaaaaaagaagagaaaagtgtagaaaacacatcatttctaagctgaagctgaggtacaaattaattaataagtgactagggtcacgtgaccctagtcacttatgattccgatgacttcgtaggttcctagctcaagccgctcgtgtccaagcgtcacttacgattagctaatgattacggcatctaggaccgactagttcttatgtgcttctagtctccaaatgtggttgatagttattttgctctaagatcaacagtaatgaagtataaatcatcgttgtggtgtgctactcggttaattgagcattaacacacacaaacatgacgaggatggtataatctccaaaaatgtgtactttgttaggtgggaccctatagccttgattaatgtgctatgttaggcatgcctggaaacgtgtgacgcatatgttttgtgaacctgttgatattatatgtgcttttatattaccatattttattaaaatactaatatttattactagtaagatataacattctatctagcttaaaaactaaccataaatattccataataactagatttaccaaactaatatactaaatatacataataaatacaaaattaacaagacaataatcaatatttatgagcttaatatatttagacattatggttggtcgacgataatcatgctaacttttcgtaattgcttgattgaaatatgcttagaataatgcctctttgttctacatggcaaatagggaccattatggtgtaacaccctgggaaccacaaacaccccgaaatgctactaaactacacaactaaccttcatatataaaatttcgacagcatctcctttgaaaatttgcatagacgtggaagcaacagagtataaacagatctagctagctaagtttaaacggccggccaaacgtgcaagcgctactagacaattcagtacattaaaaacgtccgcaatgtgttattaagttgtctaagcgtcaatttatttacaattgaatatatcctgcca

SEQ ID NO: 170 - DNA, 13210 bp, Artificial Sequence
  RV026532 - T-DNA
caaacaaacatacacagcgatttattcacacgaacccgaattacaacggtatatatcctgtcagccaacaccaaaacatcaaaaaaatcgggatcaggatcaggatctgcggccgcatcctgcaggtttaaacggccggccttcactagctagctgctaagctcaaacgagcaggaagcaacgagagggtggcgcgcgaccgacgtgcgtacgtagcatgagcctgagtggagacgttggacgtgtatgtatatacctctctgcgtgttaactatgtacgtaagcggcaggcagtgcaataagtgtggctctgtagtatgtacgtgcgggtacgatgctgtaagctactgaggcaagtccataaataaataatgacacgtgcgtgttctataatctcttcgcttcttcatttgtccccttgcggagtttggcatccattgatgccgttacgctgagaacagacacagcagacgaaccaaaagtgagttcttgtatgaaactatgacccttcatcgctaggctcaaacagcaccccgtacgaacacagcaaattagtcatctaactattagcccctacatgtttcagacgatacataaatatagcccatccttagcaattagctattggccctgcccatcccaagcaatgatctcgaagtatttttaatatatagtatttttaatatgtagcttttaaaattagaagataattttgagacaaaaatctccaagtatttttttgggtattttttactgcctccgtttttctttatttctcgtcacctagtttaattttgtgctaatcggctataaacgaaacagagagaaaagttactctaaaagcaactccaacagattagatataaatcttatatcctgcctagagctgttaaaaagatagacaactttagtggattagtgtatgcaacaaactctccaaatttaagtatcccaactacccaacgcatatcgttcccttttcattggcgcacgaactttcacctgctatagccgacgtacatgttcgttttttttgggcggcgcttactttcttccccgttcgttctcagcatcgcaactcaatttgttatggcggagaagcccttgtatcccaggtagtaatgcacagatatgcattattattattcataaaatcgagctagttaccctatgaggtgacatgaagcgctcacggttactatgacggttagcttcacgactgttggtggcagtagcgtacgacttagctatagttccggacttacctaactgactagagtcacacttagctgaccctagtcacttaggcgcgccaagcttggatctcctgcaggatctggccggccggatgggcggatctcgtacctcaactttgtatagaaaagttgggccgaattcgagctcggtacggccagaatggcccggaccgggttaccgaattcgagctcggtaccctgggatccgatatcgatgggccctggccgaagcttggtcacccggtccgggcctagaaggccagcttcaagtttgtacaaaaaagcaggctggcgccggaaccaattcagtcgagtgcggccgccagtgtgatggatatctcgacccgggtgattgcggttacatcatgtacggaaaaataattctaatccttgatttaaatttgaacttgactatttatttattctttatttcattttgtaaatcattttatgtatctcctggcaagcaattttatccaccttgcaccaacaccttcgggttccataatcaaaccaccttaacttcacaccatgctgtaactcacaccgcccagcatctccaatgtgaaagaagctaaaatttaataaacaatcatacgaagcagtgacaaaataccagatggtattaatgcttcgataaaattaattggaaagtataaaatggtagaaaataataaattataattaatttaagtaagataaaaaataattaaaaactaaaatgttaaaattttaaaaaaattattttaaataatatttaaaaacattaaaaatcattttaaaaaatttatttatagaacaattaaataaatatttcagctaataaaaaacaaaagcttacctagccttagaagacaacttgtccaacaattagatgatacccattgcccttacgttttctttaacatcaattattgtttttgtcaacaagctatcttttagttttattttattggtaaaaaatatgtcgccttcaagttgcatcatttaacacatctcgtcattagaaaaataaaactcttccctaaacgattagtagaaaaaatcattcgataataaataagaaagaaaaattagaaaaaaataacttcattttaaaaaaatcattaaggctatattttttaaatgactaattttatatagactgtaactaaaagtatacaatttattatgctatgtatcttaaagaattacttataaaaatctacggaagaatatcttacaaagtgaaaaacaaatgagaaagaatttagtgggatgattatgattttatttgaaaattgaaaaaataattattaaagactttagtggagtaagaaagctttcctattagtcttttcttatccataaaaaaaaaaaaaaaaatctagcgtgacagcttttccatagattttaataatgtaaaatactggtagcagccgaccgttcaggtaatggacactgtggtcctaacttgcaacgggtgcgggcccaatttaataacgccgtggtaacggataaagccaagcgtgaagcggtgaaggtacatctctgactccgtcaagattacgaaaccgtcaactacgaaggactccccgaaatatcatctgtgtcataaacaccaagtcacaccatacatgggcacgcgtcacaatatgattggagaacggttccaccgcatatgctataaaatgcccccacacccctcgaccctaatcgcacttcaattgcaatcaaattagttcattctctttgcgcagttccctacctctcctttcaaggttcgtagatttcttccgtttttttttcttcttctttattgtttgttctacatcagcatgatgttgatttgattgtgttttctatcgtttcatcgattataaattttcataatcagaagattcagcttttattaatgcaagaacgtccttaattgatgattttataaccgtaaattaggtctaattagagtttttttcataaagattttcagatccgtttacaacaagccttaattgttgattctgtagtcgtagattaaggtttttttcatgaactacttcagatccgttaaacaacagccttatttgttgatacttcagtcgtttttcaagaaattgttcagatccgttgataaaagccttattcgttgattctgtatggtatttcaagagatattgctcaggtcctttagcaactaccttatttgttgattctgtggccatagattaggattttttttcacgaaattgcttcttgaaattacgtgatggattttgattctgatttatcttgtgattgttgactctacagccatggcccacagcaagcacggcctgaaggaggagatgaccatgaagtaccacatggagggctgcgtgaacggccacaagttcgtgatcaccggcgagggcatcggctaccccttcaagggcaagcagaccatcaacctgtgcgtgatcgagggcggccccctgcccttcagcgaggacatcctgagcgccggcttcaagtacggcgaccggatcttcaccgagtacccccaggacatcgtggactacttcaagaacagctgccccgccggctacacctggggccggagcttcctgttcgaggacggcgccgtgtgcatctgtaacgtggacatcaccgtgagcgtgaaggagaactgcatctaccacaagagcatcttcaacggcgtgaacttccccgccgacggccccgtgatgaagaagatgaccaccaactgggaggccagctgcgagaagatcatgcccgtgcctaagcagggcatcctgaagggcgacgtgagcatgtacctgctgctgaaggacggcggccggtaccggtgccagttcgacaccgtgtacaaggccaagagcgtgcccagcaagatgcccgagtggcacttcatccagcacaagctgctgcgggaggaccggagcgacgccaagaaccagaagtggcagctgaccgagcacgccatcgccttccccagcgccctggcctgagagctcgaatttccccgatcgttcaaacatttggcaataaagtttcttaagattgaatcctgttgccggtcttgcgatgattatcatataatttctgttgaattacgttaagcatgtaataattaacatgtaatgcatgacgttatttatgagatgggtttttatgattagagtcccgcaattatacatttaatacgcgatagaaaacaaaatatagcgcgcaaactaggataaattatcgcgcgcggtgtcatctatgttactagatcgggaattctagtggccggcccagctgatatctagacccagctttcttgtacaaagtggccgttaacggatcggccagaatggcccggaccgggttaccgaattcgagctcggtaccctgggatccgatatcgatgggccctggccgaagcttggtcacccggtccgggcctagaaggccagcttcggccgccccgggcaactttattatacaaagttgatggtacggatccgtcgacggcgcgccgcggacctgaattccagcacactggcggccgttagtctaaaaacggcccctaactaacgcttagttgcccgctagattagtcccccgttagtgcctagttagacacacgacgaactaggggctactagtaacggccgccagtgtgctcggtacggccagaatggccatctggattcagcagggggtgattgcggttacatcatgtacggaaaaataattctaatccttgatttaaatttgaacttgactatttatttattctttatttcattttgtaaatcattttatgtatctcctggcaagcaattttatccaccttgcaccaacaccttcgggttccataatcaaaccaccttaacttcacaccatgctgtaactcacaccgcccagcatctccaatgtgaaagaagctaaaatttaataaacaatcatacgaagcagtgacaaaataccagatggtattaatgcttcgataaaattaattggaaagtataaaatggtagaaaataataaattataattaatttaagtaagataaaaaataattaaaaactaaaatgttaaaattttaaaaaaattattttaaataatatttaaaaacattaaaaatcattttaaaaaatttatttatagaacaattaaataaatatttcagctaataaaaaacaaaagcttacctagccttagaagacaacttgtccaacaattagatgatacccattgcccttacgttttctttaacatcaattattgtttttgtcaacaagctatcttttagttttattttattggtaaaaaatatgtcgccttcaagttgcatcatttaacacatctcgtcattagaaaaataaaactcttccctaaacgattagtagaaaaaatcattcgataataaataagaaagaaaaattagaaaaaaataacttcattttaaaaaaatcattaaggctatattttttaaatgactaattttatatagactgtaactaaaagtatacaatttattatgctatgtatcttaaagaattacttataaaaatctacggaagaatatcttacaaagtgaaaaacaaatgagaaagaatttagtgggatgattatgattttatttgaaaattgaaaaaataattattaaagactttagtggagtaagaaagctttcctattagtcttttcttatccataaaaaaaaaaaaaaaaatctagcgtgacagcttttccatagattttaataatgtaaaatactggtagcagccgaccgttcaggtaatggacactgtggtcctaacttgcaacgggtgcgggcccaatttaataacgccgtggtaacggataaagccaagcgtgaagcggtgaaggtacatctctgactccgtcaagattacgaaaccgtcaactacgaaggactccccgaaatatcatctgtgtcataaacaccaagtcacaccatacatgggcacgcgtcacaatatgattggagaacggttccaccgcatatgctataaaatgcccccacacccctcgaccctaatcgcacttcaattgcaatcaaattagttcattctctttgcgcagttccctacctctcctttcaaggttcgtagatttcttccgtttttttttcttcttctttattgtttgttctacatcagcatgatgttgatttgattgtgttttctatcgtttcatcgattataaattttcataatcagaagattcagcttttattaatgcaagaacgtccttaattgatgattttataaccgtaaattaggtctaattagagtttttttcataaagattttcagatccgtttacaacaagccttaattgttgattctgtagtcgtagattaaggtttttttcatgaactacttcagatccgttaaacaacagccttatttgttgatacttcagtcgtttttcaagaaattgttcagatccgttgataaaagccttattcgttgattctgtatggtatttcaagagatattgctcaggtcctttagcaactaccttatttgttgattctgtggccatagattaggattttttttcacgaaattgcttcttgaaattacgtgatggattttgattctgatttatcttgtgattgttgactctacagccatggctgcaactactcttacatctgctttacctggtgctttcagttcatcccagagaccaagtgctcctttcaacttacaaagatcacctagagtgcttagaaggttcaacagaaagacaggacgtcaacctcgtggacttgttcgtgctgcaaaggctcaagcggcgcaaaacctgccagagaaattcgatgaaacaagactctgggaggccctcaggggatttggggttagtccaagtagggttacttacgctcccgtcggattcggagattaccactggaccgtcacagatgaagacgggagaccttggttcgcaactgtcagtgacctcgaacacaaagagcattgcgggcagggagcacaagcagcccttaaaggactcagacaagctatggacactgccctcgcacttagagatagggacggactcagattcgtggttgctccagtggcagcaacagatgggggtggccctgtccttccccttgacgctaggtatgcactcacagtcttccctcacgtcccaggaagaacaggagagttcggacaaagactcacagaggcagagagggacagactgcttgctcttctggcagaactccacggaagaacacctcctgaaacaaccccaccagccgatatggaaccaccaggacttcctggtgttagagcagcactcgccgaaagtgaaggaccttggagtggaggaccatttgcagaacccgctagacttcttctcagagaacacgaggccacactgcacgcaagactcgctgaattcgaagccctcgtcgcaagagttaagggtcgtggagcacctcttgtcgttacccacggagaaccacacccaggcaacttgatcctcggagaggaaggctatctcctcgtggactgggatacagttggactggctccagctgaaagggatttgagtctcatctcagacgacccagctgacctcgcaagatacgcagagcttacaggaagaactccagacccagacgcactcgcactctatagactgcgttggagtctccttgatgtggctgagttcgtcgagtggttcagggctgaacaccaaagaacccaagacaccgagagtgcatggaaggggttcactgacacacttgggcaattggctgctggtggatcagctgcatagcaaacttatctctgttatgaatcagaagaagttcatgtctcgtttcatttaaaactttggtggtttgtgttttggggccttgtaaagcccctgatgaataattgttcaactatgtttccgttcctgtgttatacctttctttctaatgagtaatgacatcaaacttcttctgtattgaaattatgtccttgtgagtctctttatcatcgtttcgtctttacattatatgtgctacttttgtctaatgagcctgaaaagtggctccaatggtacgcactggaagatttgttggcttctggtagatatagcgacagtgttgagcttgtaatatcatgtctcttattgctaaattagttcctttcttaacagaaaccttcaaagtttttgtttttgttttcatttacctaatgtacacatacgctggccatgactaacaacatgtccaggcttagagcatatttttttctagcttaaattgttaacttgtcattcagtaaaatccgagaattgtgaagctctaattgaagctaattcgttttataaagtcagttaaaaagtatactaaattatccaacttttcttcaaaatctcaaaattctatgacaaaacgatagtctttgtttatgtcagtaccacaaagaggtggaaaaaaacaccaaaaaaacaataagcaaactatacactgagaagaaaaataaaagagagctcaatagatgttttatactaacggtagattagatcaaagatccaagctttactctacatagagcagaacccagaatcccttcatatctcttttattctagcaccgataatctactgaaaagaagacacttagagctctgtctctttgtcaaagaagtcccagccgtcatccagaagctccttacgttcattaacagaggccgcaattggatcgggtttacttattttgtgggtatctatacttttattagatttttaatcaggctcctgatttctttttatttcgattgaattcctgaacttgtattattcagtagatcgaataaattataaaaagataaaatcataaaataatattttatcctatcaatcatattaaagcaatgaatatgtaaaattaatcttatctttattttaaaaaatcatataggtttagtatttttttaaaaataaagataggattagttttactattcactgcttattacttttaaaaaaatcataaaggtttagtatttttttaaaataaatataggaatagttttactattcactgctttaatagaaaaatagtttaaaatttaagatagttttaatcccagcatttgccacgtttgaacgtgagccgaaacgatgtcgttacattatcttaacctagctgaaacgatgtcgtcataatatcgccaaatgccaactggactacgtcgaacccacaaatcccacaaagcgcgtgaaatcaaatcgctcaaaccacaaaaaagaacaacgcgtttgttacacgctcaatcccacgcgagtagagcacagtaaccttcaaataagcgaatggggcataatcagaaatccgaaataaacctaggggcattatcggaaatgaaaagtagctcactcaatataaaaatctaggaaccctagttttcgttatcactctgtgctccctcgctctatttctcagtctctgtgtttgcggctgaggattccgaacgagtgaccttcttcgtttctcgcaaaggtaacagcctctgctcttgtctcttcgattcgatctatgcctgtctcttatttacgatgatgtttcttcggttatgtttttttatttatgctttatgctgttgatgttcggttgtttgtttcgctttgtttttgtggttcagttttttaggattcttttggtttttgaatcgattaatcggaagagattttcgagttatttggtgtgttggaggtgaatcttttttttgaggtcatagatctgttgtatttgtgttataaacatgcgactttgtatgattttttacgaggttatgatgttctggttgttttattatgaatctgttgagacagaaccatgatttttgttgatgttcgtttacactattaaaggtttgttttaacaggattaaaagttttttaagcatgttgaaggagtcttgtagatatgtaaccgtcgatagtttttttgtgggtttgttcacatgttatcaagcttaatcttttactatgtatgcgaccatatctggatccagcaaaggcgattttttaattccttgtgaaacttttgtaatatgaagttgaaattttgttattggtaaactataaatgtgtgaagttggagtatacctttaccttcttatttggctttgtgatagtttaatttatatgtattttgagttctgacttgtatttctttgaattgattctagtttaagtaatcatggcctcctccgagaacgtcatcaccgagttcatgcgcttcaaggtgcgcatggagggcaccgtgaacggccacgagttcgagatcgagggcgagggcgagggccgcccctacgagggccacaacaccgtgaagctgaaggtgacgaagggcggccccctgcccttcgcctgggacatcctgtccccccagttccagtacggctccaaggtgtacgtgaagcaccccgccgacatccccgactacaagaagctgtccttccccgagggcttcaagtgggagcgcgtgatgaacttcgaggacggcggcgtggcgaccgtgacccaggactcctccctgcaggacggctgcttcatctacaaggtgaagttcatcggcgtgaacttcccctccgacggccccgtgatgcagaagaagaccatgggctgggaggcctccaccgagcgcctgtacccccgcgacggcgtgctgaagggcgagacccacaaggccctgaagctgaaggacggcggccactacctggtggagttcaagtccatctacatggccaagaagcccgtgcagctgcccggctactactacgtggacgccaagctggacatcacctcccacaacgaggactacaccatcgtggagcagtacgagcgcaccgagggccgccaccacctgttcctgtagttttgtgatctgatgataagtggttggttcgtgtctcatgcacttgggaggtgatctatttcacctggtgtagtttgtgtttccgtcagttggaaaaacttatccctatcgatttcgttttcattttctgcttttcttttatgtaccttcgtttgggcttgtaacgggcctttgtatttcaactctcaataataatccaagtgcatgttaaacaatttgtcatctgtttcggctttgatatactactggtgaagatgggccgtactactgcatcacaacgaaaaataataataagatgaaaaacttgaagtggaaaaaaaaaaaaacttgaatgttcactactactcattgaccataatgtttaacatacatagctcaatagtatttttgtgaatatggcaacacaaacagtccaaaacaattgtctcttactataccaaaccaagggcgccgcttgtttgccactctttgtgtgcaatagtgtgattaccacatctccacattcaatatattccctgaattatctgacgattttgatggctcactgttttcccaagtcttgaattgtcttctgtgcgccagtcaaatgcatatgtgttgagtttatcttttaaatatcaagcttttgtttttaacttttgtttgtaaccaaaaactcacagtaggagtttgatcacataattttatgtttgcctttgcaatttctagtgagtctttgattaaaagcttgaaaagaaaatgcagccaagcttaccaagtaagttatgtgtattaaccagaggaagagagaatcttgcaaaatttcaacaaacacaaaaagaagtattactacgattggtggagaaagaaaacgattccaaatcttgaactgttgttgtaaaagcatagcagaaagtgggagacaaccgaaatagaaatgactataacttaatttaatgttatcattataatttcttctagcaaatatttagaaagtaaatatcacatcaacctttaatgtaattaagctttctctttttgattcatgtgagatgaaaagaaaaaaaagaagagaaaagtgtagaaaacacatcatttctaagctgaagctgaggtacaaattaattaataagtgactagggtcacgtgaccctagtcacttatgattccgatgacttcgtaggttcctagctcaagccgctcgtgtccaagcgtcacttacgattagctaatgattacggcatctaggaccgactagttcttatgtgcttctagtctccaaatgtggttgatagttattttgctctaagatcaacagtaatgaagtataaatcatcgttgtggtgtgctactcggttaattgagcattaacacacacaaacatgacgaggatggtataatctccaaaaatgtgtactttgttaggtgggaccctatagccttgattaatgtgctatgttaggcatgcctggaaacgtgtgacgcatatgttttgtgaacctgttgatattatatgtgcttttatattaccatattttattaaaatactaatatttattactagtaagatataacattctatctagcttaaaaactaaccataaatattccataataactagatttaccaaactaatatactaaatatacataataaatacaaaattaacaagacaataatcaatatttatgagcttaatatatttagacattatggttggtcgacgataatcatgctaacttttcgtaattgcttgattgaaatatgcttagaataatgcctctttgttctacatggcaaatagggaccattatggtgtaacaccctgggaaccacaaacaccccgaaatgctactaaactacacaactaaccttcatatataaaatttcgacagcatctcctttgaaaatttgcatagacgtggaagcaacagagtataaacagatctagctagctaagtttaaacggccggccaaacgtgcaagcgctactagacaattcagtacattaaaaacgtccgcaatgtgttattaagttgtctaagcgtcaatttatttacaattgaatatatcctgcca

SEQ ID NO: 171 - DNA, 16939 bp, Artificial Sequence
  RV027337 T-DNA
caaacaaacatacacagcgatttattcacacgaacccgaattacaacggtatatatcctgtcagccaacaccaaaacatcaaaaaaatcgggatcaggatcaggatctgcggccgcatcctgcaggtttaaacggccggccttcactagctagctgctaagctcaaacgagcaggaagcaacgagagggtggcgcgcgaccgacgtgcgtacgtagcatgagcctgagtggagacgttggacgtgtatgtatatacctctctgcgtgttaactatgtacgtaagcggcaggcagtgcaataagtgtggctctgtagtatgtacgtgcgggtacgatgctgtaagctactgaggcaagtccataaataaataatgacacgtgcgtgttctataatctcttcgcttcttcatttgtccccttgcggagtttggcatccattgatgccgttacgctgagaacagacacagcagacgaaccaaaagtgagttcttgtatgaaactatgacccttcatcgctaggctcaaacagcaccccgtacgaacacagcaaattagtcatctaactattagcccctacatgtttcagacgatacataaatatagcccatccttagcaattagctattggccctgcccatcccaagcaatgatctcgaagtatttttaatatatagtatttttaatatgtagcttttaaaattagaagataattttgagacaaaaatctccaagtatttttttgggtattttttactgcctccgtttttctttatttctcgtcacctagtttaattttgtgctaatcggctataaacgaaacagagagaaaagttactctaaaagcaactccaacagattagatataaatcttatatcctgcctagagctgttaaaaagatagacaactttagtggattagtgtatgcaacaaactctccaaatttaagtatcccaactacccaacgcatatcgttcccttttcattggcgcacgaactttcacctgctatagccgacgtacatgttcgttttttttgggcggcgcttactttcttccccgttcgttctcagcatcgcaactcaatttgttatggcggagaagcccttgtatcccaggtagtaatgcacagatatgcattattattattcataaaatcgagctagttaccctatgaggtgacatgaagcgctcacggttactatgacggttagcttcacgactgttggtggcagtagcgtacgacttagctatagttccggacttacctaactgactagagtcacacttagctgaccctagtcacttaggcgcgccaagcttggatctcctgcaggatctggccggccggatgggcggatctcgtacctcaactttgtatagaaaagttgggccagaatggcccggaccgggttaccaagcggccgctttgagccaacagtcggaaaacaaccatcacttagcatttttttatttttaatactactatttttttttttgtaattagtcgagtgtaccaatcccaaatttaatgggtatctttcataaccaaaaagaaaaaagcacaaaaacaaaatactactactatactataatggtgaaacacacattacattagcattaaccgctattccttaaaagatatatgagcagactacaaggaagtacatttaaatcagtgtgctaagttttctcaattatcaatctaataattgtacttacataaatttaccaaatcatctcaccatttagggcatacaatttttgctcaataatggagcttgaaaagactaattatagaatgtctttttggttgacacaagctcgcttcttcatgtcgtttactttaaaaattgtagattctttcacaacttataagattctatagcctatttgattatcctttaggatgatgagtataatatctcaaactataaaataaaaatgttcacatcaataattgaaaaaaaatgcatgtatgaattcacgaaaatatggttacggttgtgtgttgctgctagacaaaagtctttcatatattcagttatatttcttaaaactaatcaaaattgttttatgcaattttggcgagtagagagaaaaagcgcgtgggataaataaagaaaggcgttataaaaaaagagaaaaagtcaaccgagtagttctggtaagagagtctcgtgcattcgtaaggtttccaagagtccacatatctatttcatcatcctcttaacgtttttctcacttacttttttccccactcttaattgattccgttgataaaatttgttcgttatatagaaataatcagaatataattagggttaattttggagtaaagaccattcaatcaatggtttggcttgattcttgtttgaaattctatgtttaaaaagggtaatacttacaaacttgactttattagtattttaaaaaatgacaaaacttaaaatggatttgaaatctagcatatttaactttaatacagttttggtttaagtttcactctcttttctatcaaaaatataattttaaaatttgaaagatgttaaaatagacaaatgtcattagtttgttcagatttagttatgtttttaatatacagacaattatattaaaataataataaaaaagtcagatcagttataaaagaaagtcagttcagttttaagacttaagtttgagtcttttggatttgaatttaatagattcacttttattaaaaattgttgaaacactttttaaaaactaaaacatttgtcaaaaaatgcatttaaccaaaaaaatgaaaatgaaaggtagtaagtaataaaagaagaaaacaaaatctaaaaaagtgtctttaaaatctcaaaattaaaatatacaaaaaagtacaagaaaataaaagaaaagggggaaaaagagagtcaatatcaacatgcaagtgtgaatattagactcttcttctctcatcagttaccccaaaactagggtttacccattttcatcatcttcttcttccccacatcactctctgaaagacaataagagagagagacacacacaccaaaaaaaaaaccccattgatttttaagagagagagagagactgagaacgaagagcaaatgagagagaagttgaatcaaatttccgctttcgttctctttctctctcctccatttcagtaataaacactccttcctctttaatttttctgggtttcttcttcttccctcttttgttgtttctgtgtgattcagttctcgatccatcttttcgtgaaaagtatcaatcttttaattctctagttgtttgtcaaatctggttagtttcttctcttgtatttatttgccatggaaactcaacaacaacaagcagatattcaagattttgggaacaaaaacagtaacacctatgcatgcaggcaaagcagtactaggtggacacccacaagtgatcagatcagaatactgaaagagctctactacaacaatggaatcagatcaccaactgctgatcagattcagagaatcgctgctcaactcagacagtacggcaagattgaaggcaagaacgtgttttattggtttcagaaccataaagctcgtgaacgccagaagaaacggttcactcctactgctcctccaccaccgtctcacttctccgatcatattaaccaccatcttcccaacgctgcccccatgcagattccgtctcaccaccaccactaccaccatcaagaaccaccacatgtctatgctcaccctcacaaactctacaccactcatcacattggggttggttcttcttcacaaggagtgatgggtgtagggtgtggctatggatctgttgctatggagaagagtttcaggaagtgttcaatatcaccaccgggagagagtaaggccacaggaggaattggccggaatatcggttcaagatcacggataagtgtcgattcgtgttccttcttcgacacaattaagccaaagacatatgagatgtttgagaatcatgatcaagatgaagaacaaggagagccttcaactgagatcgaaacacttccattattcccgattcacgacggcaaccatcatgatttcttcggcatgaggacggcaaatctgcaattggagcaaggcactggaggttactacactggaggaagctggtatcggtctgatgagagggcgtctcttgagctcagtctcaactcatatggttattataactaattcgaactggccaggtacctgacatcttatagtctgcaacctctcgtgtctgaattcctatctttatcaagtgttattgcttccacgactataggacagctttcgtcgaaaggttttgctcatgtgatctcgaaggattcatctagtctgatttttcgtgacttgtatcggttttattggattcatccaacatatatcaataaaaaatgagttgtgtttcctttcttcctagttcagttaaaattatttccctcctgcgcttgtgctgtaattgtctgtgtacctgttgtttgtgactgtgttagttcccttggatatgatttcgtatttgatatgtacatggagatagcttagcttcattattggagtatgaagttagtatgacatagtcactctcctggaaaattgacactgcaaaccatatttttattctgaaccacaaatcctagtcagtccgctggcatatgccgtccgtttgctgaatccagaacgtgggtttggagatgtacggctgagatgcctctatgcgaaggggatttcgtggtgaaacgagatgggagtagagcaacgcccgtggaagatgcttcaaacttccacacttttgagcaacgatcggcagtagtaaggtagacgatttcaagatcaaagcatatgaagataaacaacatcaacaacaaaatttgttggggttctatagagagaaacagagctacatacatacactgttttgtatctaccatctgagatgatgaaaagatgaaaaactaaagaatgccccggcgccaacgccaggacacgccgcgcgcgcgtcacccgagccatctcttgacccagccggcgctgtatatttacacacgttgcagcatcgatcaccacctgttcgatcgcgtcgccgtcaccaagcttggcgcgccggtcacccggtccgggcctagaaggccacccggggctcggcgttaggcttttagtccgctaggtggctagaccgaggttaggacgctagttcactaggggcctagtggtgttttaaggatgggcaagtttgtacaaaaaagcaggctggcgccggaaccaattcagtcgagtgcggccgccagtgtgatggatatctcgacccgggtgattgcggttacatcatgtacggaaaaataattctaatccttgatttaaatttgaacttgactatttatttattctttatttcattttgtaaatcattttatgtatctcctggcaagcaattttatccaccttgcaccaacaccttcgggttccataatcaaaccaccttaacttcacaccatgctgtaactcacaccgcccagcatctccaatgtgaaagaagctaaaatttaataaacaatcatacgaagcagtgacaaaataccagatggtattaatgcttcgataaaattaattggaaagtataaaatggtagaaaataataaattataattaatttaagtaagataaaaaataattaaaaactaaaatgttaaaattttaaaaaaattattttaaataatatttaaaaacattaaaaatcattttaaaaaatttatttatagaacaattaaataaatatttcagctaataaaaaacaaaagcttacctagccttagaagacaacttgtccaacaattagatgatacccattgcccttacgttttctttaacatcaattattgtttttgtcaacaagctatcttttagttttattttattggtaaaaaatatgtcgccttcaagttgcatcatttaacacatctcgtcattagaaaaataaaactcttccctaaacgattagtagaaaaaatcattcgataataaataagaaagaaaaattagaaaaaaataacttcattttaaaaaaatcattaaggctatattttttaaatgactaattttatatagactgtaactaaaagtatacaatttattatgctatgtatcttaaagaattacttataaaaatctacggaagaatatcttacaaagtgaaaaacaaatgagaaagaatttagtgggatgattatgattttatttgaaaattgaaaaaataattattaaagactttagtggagtaagaaagctttcctattagtcttttcttatccataaaaaaaaaaaaaaaaatctagcgtgacagcttttccatagattttaataatgtaaaatactggtagcagccgaccgttcaggtaatggacactgtggtcctaacttgcaacgggtgcgggcccaatttaataacgccgtggtaacggataaagccaagcgtgaagcggtgaaggtacatctctgactccgtcaagattacgaaaccgtcaactacgaaggactccccgaaatatcatctgtgtcataaacaccaagtcacaccatacatgggcacgcgtcacaatatgattggagaacggttccaccgcatatgctataaaatgcccccacacccctcgaccctaatcgcacttcaattgcaatcaaattagttcattctctttgcgcagttccctacctctcctttcaaggttcgtagatttcttccgtttttttttcttcttctttattgtttgttctacatcagcatgatgttgatttgattgtgttttctatcgtttcatcgattataaattttcataatcagaagattcagcttttattaatgcaagaacgtccttaattgatgattttataaccgtaaattaggtctaattagagtttttttcataaagattttcagatccgtttacaacaagccttaattgttgattctgtagtcgtagattaaggtttttttcatgaactacttcagatccgttaaacaacagccttatttgttgatacttcagtcgtttttcaagaaattgttcagatccgttgataaaagccttattcgttgattctgtatggtatttcaagagatattgctcaggtcctttagcaactaccttatttgttgattctgtggccatagattaggattttttttcacgaaattgcttcttgaaattacgtgatggattttgattctgatttatcttgtgattgttgactctacagccatggcccacagcaagcacggcctgaaggaggagatgaccatgaagtaccacatggagggctgcgtgaacggccacaagttcgtgatcaccggcgagggcatcggctaccccttcaagggcaagcagaccatcaacctgtgcgtgatcgagggcggccccctgcccttcagcgaggacatcctgagcgccggcttcaagtacggcgaccggatcttcaccgagtacccccaggacatcgtggactacttcaagaacagctgccccgccggctacacctggggccggagcttcctgttcgaggacggcgccgtgtgcatctgtaacgtggacatcaccgtgagcgtgaaggagaactgcatctaccacaagagcatcttcaacggcgtgaacttccccgccgacggccccgtgatgaagaagatgaccaccaactgggaggccagctgcgagaagatcatgcccgtgcctaagcagggcatcctgaagggcgacgtgagcatgtacctgctgctgaaggacggcggccggtaccggtgccagttcgacaccgtgtacaaggccaagagcgtgcccagcaagatgcccgagtggcacttcatccagcacaagctgctgcgggaggaccggagcgacgccaagaaccagaagtggcagctgaccgagcacgccatcgccttccccagcgccctggcctgagagctcgaatttccccgatcgttcaaacatttggcaataaagtttcttaagattgaatcctgttgccggtcttgcgatgattatcatataatttctgttgaattacgttaagcatgtaataattaacatgtaatgcatgacgttatttatgagatgggtttttatgattagagtcccgcaattatacatttaatacgcgatagaaaacaaaatatagcgcgcaaactaggataaattatcgcgcgcggtgtcatctatgttactagatcgggaattctagtggccggcccagctgatatctagacccagctttcttgtacaaagtggccgttaacggatcggccagaatggcccggaccgggttaccgaattcgagctcggtaccctgggatccgatatcgatgggccctggccgaagcttggtcacccggtccgggcctagaaggccagcttcggccgccccgggcaactttattatacaaagttgatggtacggatccgtcgacggcgcgccgcggacctgaattccagcacactggcggccgttagtctaaaaacggcccctaactaacgcttagttgcccgctagattagtcccccgttagtgcctagttagacacacgacgaactaggggctactagtaacggccgccagtgtgctcggtacggccagaatggccatctggattcagcagggggtgattgcggttacatcatgtacggaaaaataattctaatccttgatttaaatttgaacttgactatttatttattctttatttcattttgtaaatcattttatgtatctcctggcaagcaattttatccaccttgcaccaacaccttcgggttccataatcaaaccaccttaacttcacaccatgctgtaactcacaccgcccagcatctccaatgtgaaagaagctaaaatttaataaacaatcatacgaagcagtgacaaaataccagatggtattaatgcttcgataaaattaattggaaagtataaaatggtagaaaataataaattataattaatttaagtaagataaaaaataattaaaaactaaaatgttaaaattttaaaaaaattattttaaataatatttaaaaacattaaaaatcattttaaaaaatttatttatagaacaattaaataaatatttcagctaataaaaaacaaaagcttacctagccttagaagacaacttgtccaacaattagatgatacccattgcccttacgttttctttaacatcaattattgtttttgtcaacaagctatcttttagttttattttattggtaaaaaatatgtcgccttcaagttgcatcatttaacacatctcgtcattagaaaaataaaactcttccctaaacgattagtagaaaaaatcattcgataataaataagaaagaaaaattagaaaaaaataacttcattttaaaaaaatcattaaggctatattttttaaatgactaattttatatagactgtaactaaaagtatacaatttattatgctatgtatcttaaagaattacttataaaaatctacggaagaatatcttacaaagtgaaaaacaaatgagaaagaatttagtgggatgattatgattttatttgaaaattgaaaaaataattattaaagactttagtggagtaagaaagctttcctattagtcttttcttatccataaaaaaaaaaaaaaaaatctagcgtgacagcttttccatagattttaataatgtaaaatactggtagcagccgaccgttcaggtaatggacactgtggtcctaacttgcaacgggtgcgggcccaatttaataacgccgtggtaacggataaagccaagcgtgaagcggtgaaggtacatctctgactccgtcaagattacgaaaccgtcaactacgaaggactccccgaaatatcatctgtgtcataaacaccaagtcacaccatacatgggcacgcgtcacaatatgattggagaacggttccaccgcatatgctataaaatgcccccacacccctcgaccctaatcgcacttcaattgcaatcaaattagttcattctctttgcgcagttccctacctctcctttcaaggttcgtagatttcttccgtttttttttcttcttctttattgtttgttctacatcagcatgatgttgatttgattgtgttttctatcgtttcatcgattataaattttcataatcagaagattcagcttttattaatgcaagaacgtccttaattgatgattttataaccgtaaattaggtctaattagagtttttttcataaagattttcagatccgtttacaacaagccttaattgttgattctgtagtcgtagattaaggtttttttcatgaactacttcagatccgttaaacaacagccttatttgttgatacttcagtcgtttttcaagaaattgttcagatccgttgataaaagccttattcgttgattctgtatggtatttcaagagatattgctcaggtcctttagcaactaccttatttgttgattctgtggccatagattaggattttttttcacgaaattgcttcttgaaattacgtgatggattttgattctgatttatcttgtgattgttgactctacagccatggctgcaactactcttacatctgctttacctggtgctttcagttcatcccagagaccaagtgctcctttcaacttacaaagatcacctagagtgcttagaaggttcaacagaaagacaggacgtcaacctcgtggacttgttcgtgctgcaaaggctcaagcggcgcaaaacctgccagagaaattcgatgaaacaagactctgggaggccctcaggggatttggggttagtccaagtagggttacttacgctcccgtcggattcggagattaccactggaccgtcacagatgaagacgggagaccttggttcgcaactgtcagtgacctcgaacacaaagagcattgcgggcagggagcacaagcagcccttaaaggactcagacaagctatggacactgccctcgcacttagagatagggacggactcagattcgtggttgctccagtggcagcaacagatgggggtggccctgtccttccccttgacgctaggtatgcactcacagtcttccctcacgtcccaggaagaacaggagagttcggacaaagactcacagaggcagagagggacagactgcttgctcttctggcagaactccacggaagaacacctcctgaaacaaccccaccagccgatatggaaccaccaggacttcctggtgttagagcagcactcgccgaaagtgaaggaccttggagtggaggaccatttgcagaacccgctagacttcttctcagagaacacgaggccacactgcacgcaagactcgctgaattcgaagccctcgtcgcaagagttaagggtcgtggagcacctcttgtcgttacccacggagaaccacacccaggcaacttgatcctcggagaggaaggctatctcctcgtggactgggatacagttggactggctccagctgaaagggatttgagtctcatctcagacgacccagctgacctcgcaagatacgcagagcttacaggaagaactccagacccagacgcactcgcactctatagactgcgttggagtctccttgatgtggctgagttcgtcgagtggttcagggctgaacaccaaagaacccaagacaccgagagtgcatggaaggggttcactgacacacttgggcaattggctgctggtggatcagctgcatagcaaacttatctctgttatgaatcagaagaagttcatgtctcgtttcatttaaaactttggtggtttgtgttttggggccttgtaaagcccctgatgaataattgttcaactatgtttccgttcctgtgttatacctttctttctaatgagtaatgacatcaaacttcttctgtattgaaattatgtccttgtgagtctctttatcatcgtttcgtctttacattatatgtgctacttttgtctaatgagcctgaaaagtggctccaatggtacgcactggaagatttgttggcttctggtagatatagcgacagtgttgagcttgtaatatcatgtctcttattgctaaattagttcctttcttaacagaaaccttcaaagtttttgtttttgttttcatttacctaatgtacacatacgctggccatgactaacaacatgtccaggcttagagcatatttttttctagcttaaattgttaacttgtcattcagtaaaatccgagaattgtgaagctctaattgaagctaattcgttttataaagtcagttaaaaagtatactaaattatccaacttttcttcaaaatctcaaaattctatgacaaaacgatagtctttgtttatgtcagtaccacaaagaggtggaaaaaaacaccaaaaaaacaataagcaaactatacactgagaagaaaaataaaagagagctcaatagatgttttatactaacggtagattagatcaaagatccaagctttactctacatagagcagaacccagaatcccttcatatctcttttattctagcaccgataatctactgaaaagaagacacttagagctctgtctctttgtcaaagaagtcccagccgtcatccagaagctccttacgttcattaacagaggccgcaattggatcgggtttacttattttgtgggtatctatacttttattagatttttaatcaggctcctgatttctttttatttcgattgaattcctgaacttgtattattcagtagatcgaataaattataaaaagataaaatcataaaataatattttatcctatcaatcatattaaagcaatgaatatgtaaaattaatcttatctttattttaaaaaatcatataggtttagtatttttttaaaaataaagataggattagttttactattcactgcttattacttttaaaaaaatcataaaggtttagtatttttttaaaataaatataggaatagttttactattcactgctttaatagaaaaatagtttaaaatttaagatagttttaatcccagcatttgccacgtttgaacgtgagccgaaacgatgtcgttacattatcttaacctagctgaaacgatgtcgtcataatatcgccaaatgccaactggactacgtcgaacccacaaatcccacaaagcgcgtgaaatcaaatcgctcaaaccacaaaaaagaacaacgcgtttgttacacgctcaatcccacgcgagtagagcacagtaaccttcaaataagcgaatggggcataatcagaaatccgaaataaacctaggggcattatcggaaatgaaaagtagctcactcaatataaaaatctaggaaccctagttttcgttatcactctgtgctccctcgctctatttctcagtctctgtgtttgcggctgaggattccgaacgagtgaccttcttcgtttctcgcaaaggtaacagcctctgctcttgtctcttcgattcgatctatgcctgtctcttatttacgatgatgtttcttcggttatgtttttttatttatgctttatgctgttgatgttcggttgtttgtttcgctttgtttttgtggttcagttttttaggattcttttggtttttgaatcgattaatcggaagagattttcgagttatttggtgtgttggaggtgaatcttttttttgaggtcatagatctgttgtatttgtgttataaacatgcgactttgtatgattttttacgaggttatgatgttctggttgttttattatgaatctgttgagacagaaccatgatttttgttgatgttcgtttacactattaaaggtttgttttaacaggattaaaagttttttaagcatgttgaaggagtcttgtagatatgtaaccgtcgatagtttttttgtgggtttgttcacatgttatcaagcttaatcttttactatgtatgcgaccatatctggatccagcaaaggcgattttttaattccttgtgaaacttttgtaatatgaagttgaaattttgttattggtaaactataaatgtgtgaagttggagtatacctttaccttcttatttggctttgtgatagtttaatttatatgtattttgagttctgacttgtatttctttgaattgattctagtttaagtaatcatggcctcctccgagaacgtcatcaccgagttcatgcgcttcaaggtgcgcatggagggcaccgtgaacggccacgagttcgagatcgagggcgagggcgagggccgcccctacgagggccacaacaccgtgaagctgaaggtgacgaagggcggccccctgcccttcgcctgggacatcctgtccccccagttccagtacggctccaaggtgtacgtgaagcaccccgccgacatccccgactacaagaagctgtccttccccgagggcttcaagtgggagcgcgtgatgaacttcgaggacggcggcgtggcgaccgtgacccaggactcctccctgcaggacggctgcttcatctacaaggtgaagttcatcggcgtgaacttcccctccgacggccccgtgatgcagaagaagaccatgggctgggaggcctccaccgagcgcctgtacccccgcgacggcgtgctgaagggcgagacccacaaggccctgaagctgaaggacggcggccactacctggtggagttcaagtccatctacatggccaagaagcccgtgcagctgcccggctactactacgtggacgccaagctggacatcacctcccacaacgaggactacaccatcgtggagcagtacgagcgcaccgagggccgccaccacctgttcctgtagttttgtgatctgatgataagtggttggttcgtgtctcatgcacttgggaggtgatctatttcacctggtgtagtttgtgtttccgtcagttggaaaaacttatccctatcgatttcgttttcattttctgcttttcttttatgtaccttcgtttgggcttgtaacgggcctttgtatttcaactctcaataataatccaagtgcatgttaaacaatttgtcatctgtttcggctttgatatactactggtgaagatgggccgtactactgcatcacaacgaaaaataataataagatgaaaaacttgaagtggaaaaaaaaaaaaacttgaatgttcactactactcattgaccataatgtttaacatacatagctcaatagtatttttgtgaatatggcaacacaaacagtccaaaacaattgtctcttactataccaaaccaagggcgccgcttgtttgccactctttgtgtgcaatagtgtgattaccacatctccacattcaatatattccctgaattatctgacgattttgatggctcactgttttcccaagtcttgaattgtcttctgtgcgccagtcaaatgcatatgtgttgagtttatcttttaaatatcaagcttttgtttttaacttttgtttgtaaccaaaaactcacagtaggagtttgatcacataattttatgtttgcctttgcaatttctagtgagtctttgattaaaagcttgaaaagaaaatgcagccaagcttaccaagtaagttatgtgtattaaccagaggaagagagaatcttgcaaaatttcaacaaacacaaaaagaagtattactacgattggtggagaaagaaaacgattccaaatcttgaactgttgttgtaaaagcatagcagaaagtgggagacaaccgaaatagaaatgactataacttaatttaatgttatcattataatttcttctagcaaatatttagaaagtaaatatcacatcaacctttaatgtaattaagctttctctttttgattcatgtgagatgaaaagaaaaaaaagaagagaaaagtgtagaaaacacatcatttctaagctgaagctgaggtacaaattaattaataagtgactagggtcacgtgaccctagtcacttatgattccgatgacttcgtaggttcctagctcaagccgctcgtgtccaagcgtcacttacgattagctaatgattacggcatctaggaccgactagttcttatgtgcttctagtctccaaatgtggttgatagttattttgctctaagatcaacagtaatgaagtataaatcatcgttgtggtgtgctactcggttaattgagcattaacacacacaaacatgacgaggatggtataatctccaaaaatgtgtactttgttaggtgggaccctatagccttgattaatgtgctatgttaggcatgcctggaaacgtgtgacgcatatgttttgtgaacctgttgatattatatgtgcttttatattaccatattttattaaaatactaatatttattactagtaagatataacattctatctagcttaaaaactaaccataaatattccataataactagatttaccaaactaatatactaaatatacataataaatacaaaattaacaagacaataatcaatatttatgagcttaatatatttagacattatggttggtcgacgataatcatgctaacttttcgtaattgcttgattgaaatatgcttagaataatgcctctttgttctacatggcaaatagggaccattatggtgtaacaccctgggaaccacaaacaccccgaaatgctactaaactacacaactaaccttcatatataaaatttcgacagcatctcctttgaaaatttgcatagacgtggaagcaacagagtataaacagatctagctagctaagtttaaacggccggccaaacgtgcaagcgctactagacaattcagtacattaaaaacgtccgcaatgtgttattaagttgtctaagcgtcaatttatttacaattgaatatatcctgcca

SEQ ID NO: 172 - DNA, 16238 bp, Artificial Sequence
  RV027338 T-DNA
caaacaaacatacacagcgatttattcacacgaacccgaattacaacggtatatatcctgtcagccaacaccaaaacatcaaaaaaatcgggatcaggatcaggatctgcggccgcatcctgcaggtttaaacggccggccttcactagctagctgctaagctcaaacgagcaggaagcaacgagagggtggcgcgcgaccgacgtgcgtacgtagcatgagcctgagtggagacgttggacgtgtatgtatatacctctctgcgtgttaactatgtacgtaagcggcaggcagtgcaataagtgtggctctgtagtatgtacgtgcgggtacgatgctgtaagctactgaggcaagtccataaataaataatgacacgtgcgtgttctataatctcttcgcttcttcatttgtccccttgcggagtttggcatccattgatgccgttacgctgagaacagacacagcagacgaaccaaaagtgagttcttgtatgaaactatgacccttcatcgctaggctcaaacagcaccccgtacgaacacagcaaattagtcatctaactattagcccctacatgtttcagacgatacataaatatagcccatccttagcaattagctattggccctgcccatcccaagcaatgatctcgaagtatttttaatatatagtatttttaatatgtagcttttaaaattagaagataattttgagacaaaaatctccaagtatttttttgggtattttttactgcctccgtttttctttatttctcgtcacctagtttaattttgtgctaatcggctataaacgaaacagagagaaaagttactctaaaagcaactccaacagattagatataaatcttatatcctgcctagagctgttaaaaagatagacaactttagtggattagtgtatgcaacaaactctccaaatttaagtatcccaactacccaacgcatatcgttcccttttcattggcgcacgaactttcacctgctatagccgacgtacatgttcgttttttttgggcggcgcttactttcttccccgttcgttctcagcatcgcaactcaatttgttatggcggagaagcccttgtatcccaggtagtaatgcacagatatgcattattattattcataaaatcgagctagttaccctatgaggtgacatgaagcgctcacggttactatgacggttagcttcacgactgttggtggcagtagcgtacgacttagctatagttccggacttacctaactgactagagtcacacttagctgaccctagtcacttaggcgcgccaagcttggatctcctgcaggatctggccggccggatgggcggatctcgtacctcaactttgtatagaaaagttgggccagaatggcccggaccgggttaccaagcggccgcatatcggttgttgacgattaaccatgcaaaaaagaaacattaattgcgaatgtaaataacaaaacatgtaactcttgtagatatacatgtatcgacatttaaacccgaatatatatgtatacctataatttctctgattttcacgctacctgccacgtacatgggtgataggtccaaactcacaagtaaaagtttacgtacagtgaattcgtctttttgggtataaacgtacatttaatttacacgtaagaaaggattaccaattctttcatttatggtaccagacagagttaaggcaaacaagagaaacatatagagttttgatatgttttcttggataaatattaaattgatgcaatatttagggatggacacaaggtaatatatgccttttaaggtatatgtgctatatgaatcgtttcgcatgggtactaaaattatttgtccttactttatataaacaaattccaacaaaatcaagtttttgctaaaactagtttatttgcgggttatttaattacctatcatattacttgtaatatcattcgtatgttaacgggtaaaccaaaccaaaccggatattgaactattaaaaatcttgtaaatttgacacaaactaatgaatatctaaattatgttactgctatgataacgaccatttttgtttttgagaaccataatataaattacaggtacgtgacaagtactaagtatttatatccacctttagtcacagtaccaatattgcgcctaccgggcaacgtgaacgtgatcatcaaatcaaagtagttaccaaacgctttgatctcgataaaactaaaagctgacacgtcttgctgtttcttaatttatttctcttacaacgacaattttgagaaatatgaaatttttatatcgaaagggaacagtccttatcatttgctcccatcacttgcttttgtctagttacaactggaaatcgaagagaagtattacaaaaacatttttctcgtcatttataaaaaaatgacaaaaaattaaatagagagcaaagcaagagcgttgggtgacgttggtctcttcattaactcctctcatctaccccttcctctgttcgcctttatatccttcaccttccctctctcatcttcattaactcatcttcaaaaataccctaatcacattttgtaacaataatacaattatacattaaaactctccgacgccatggaaactcaacaacaacaagcagatattcaagattttgggaacaaaaacagtaacacctatgcatgcaggcaaagcagtactaggtggacacccacaagtgatcagatcagaatactgaaagagctctactacaacaatggaatcagatcaccaactgctgatcagattcagagaatcgctgctcaactcagacagtacggcaagattgaaggcaagaacgtgttttattggtttcagaaccataaagctcgtgaacgccagaagaaacggttcactcctactgctcctccaccaccgtctcacttctccgatcatattaaccaccatcttcccaacgctgcccccatgcagattccgtctcaccaccaccactaccaccatcaagaaccaccacatgtctatgctcaccctcacaaactctacaccactcatcacattggggttggttcttcttcacaaggagtgatgggtgtagggtgtggctatggatctgttgctatggagaagagtttcaggaagtgttcaatatcaccaccgggagagagtaaggccacaggaggaattggccggaatatcggttcaagatcacggataagtgtcgattcgtgttccttcttcgacacaattaagccaaagacatatgagatgtttgagaatcatgatcaagatgaagaacaaggagagccttcaactgagatcgaaacacttccattattcccgattcacgacggcaaccatcatgatttcttcggcatgaggacggcaaatctgcaattggagcaaggcactggaggttactacactggaggaagctggtatcggtctgatgagagggcgtctcttgagctcagtctcaactcatatggttattataactaattcgaactggccaggtacctgacatcttatagtctgcaacctctcgtgtctgaattcctatctttatcaagtgttattgcttccacgactataggacagctttcgtcgaaaggttttgctcatgtgatctcgaaggattcatctagtctgatttttcgtgacttgtatcggttttattggattcatccaacatatatcaataaaaaatgagttgtgtttcctttcttcctagttcagttaaaattatttccctcctgcgcttgtgctgtaattgtctgtgtacctgttgtttgtgactgtgttagttcccttggatatgatttcgtatttgatatgtacatggagatagcttagcttcattattggagtatgaagttagtatgacatagtcactctcctggaaaattgacactgcaaaccatatttttattctgaaccacaaatcctagtcagtccgctggcatatgccgtccgtttgctgaatccagaacgtgggtttggagatgtacggctgagatgcctctatgcgaaggggatttcgtggtgaaacgagatgggagtagagcaacgcccgtggaagatgcttcaaacttccacacttttgagcaacgatcggcagtagtaaggtagacgatttcaagatcaaagcatatgaagataaacaacatcaacaacaaaatttgttggggttctatagagagaaacagagctacatacatacactgttttgtatctaccatctgagatgatgaaaagatgaaaaactaaagaatgccccggcgccaacgccaggacacgccgcgcgcgcgtcacccgagccatctcttgacccagccggcgctgtatatttacacacgttgcagcatcgatcaccacctgttcgatcgcgtcgccgtcaccaagcttggcgcgccggtcacccggtccgggcctagaaggccacccggggctcggcgttaggcttttagtccgctaggtggctagaccgaggttaggacgctagttcactaggggcctagtggtgttttaaggatgggcaagtttgtacaaaaaagcaggctggcgccggaaccaattcagtcgagtgcggccgccagtgtgatggatatctcgacccgggtgattgcggttacatcatgtacggaaaaataattctaatccttgatttaaatttgaacttgactatttatttattctttatttcattttgtaaatcattttatgtatctcctggcaagcaattttatccaccttgcaccaacaccttcgggttccataatcaaaccaccttaacttcacaccatgctgtaactcacaccgcccagcatctccaatgtgaaagaagctaaaatttaataaacaatcatacgaagcagtgacaaaataccagatggtattaatgcttcgataaaattaattggaaagtataaaatggtagaaaataataaattataattaatttaagtaagataaaaaataattaaaaactaaaatgttaaaattttaaaaaaattattttaaataatatttaaaaacattaaaaatcattttaaaaaatttatttatagaacaattaaataaatatttcagctaataaaaaacaaaagcttacctagccttagaagacaacttgtccaacaattagatgatacccattgcccttacgttttctttaacatcaattattgtttttgtcaacaagctatcttttagttttattttattggtaaaaaatatgtcgccttcaagttgcatcatttaacacatctcgtcattagaaaaataaaactcttccctaaacgattagtagaaaaaatcattcgataataaataagaaagaaaaattagaaaaaaataacttcattttaaaaaaatcattaaggctatattttttaaatgactaattttatatagactgtaactaaaagtatacaatttattatgctatgtatcttaaagaattacttataaaaatctacggaagaatatcttacaaagtgaaaaacaaatgagaaagaatttagtgggatgattatgattttatttgaaaattgaaaaaataattattaaagactttagtggagtaagaaagctttcctattagtcttttcttatccataaaaaaaaaaaaaaaaatctagcgtgacagcttttccatagattttaataatgtaaaatactggtagcagccgaccgttcaggtaatggacactgtggtcctaacttgcaacgggtgcgggcccaatttaataacgccgtggtaacggataaagccaagcgtgaagcggtgaaggtacatctctgactccgtcaagattacgaaaccgtcaactacgaaggactccccgaaatatcatctgtgtcataaacaccaagtcacaccatacatgggcacgcgtcacaatatgattggagaacggttccaccgcatatgctataaaatgcccccacacccctcgaccctaatcgcacttcaattgcaatcaaattagttcattctctttgcgcagttccctacctctcctttcaaggttcgtagatttcttccgtttttttttcttcttctttattgtttgttctacatcagcatgatgttgatttgattgtgttttctatcgtttcatcgattataaattttcataatcagaagattcagcttttattaatgcaagaacgtccttaattgatgattttataaccgtaaattaggtctaattagagtttttttcataaagattttcagatccgtttacaacaagccttaattgttgattctgtagtcgtagattaaggtttttttcatgaactacttcagatccgttaaacaacagccttatttgttgatacttcagtcgtttttcaagaaattgttcagatccgttgataaaagccttattcgttgattctgtatggtatttcaagagatattgctcaggtcctttagcaactaccttatttgttgattctgtggccatagattaggattttttttcacgaaattgcttcttgaaattacgtgatggattttgattctgatttatcttgtgattgttgactctacagccatggcccacagcaagcacggcctgaaggaggagatgaccatgaagtaccacatggagggctgcgtgaacggccacaagttcgtgatcaccggcgagggcatcggctaccccttcaagggcaagcagaccatcaacctgtgcgtgatcgagggcggccccctgcccttcagcgaggacatcctgagcgccggcttcaagtacggcgaccggatcttcaccgagtacccccaggacatcgtggactacttcaagaacagctgccccgccggctacacctggggccggagcttcctgttcgaggacggcgccgtgtgcatctgtaacgtggacatcaccgtgagcgtgaaggagaactgcatctaccacaagagcatcttcaacggcgtgaacttccccgccgacggccccgtgatgaagaagatgaccaccaactgggaggccagctgcgagaagatcatgcccgtgcctaagcagggcatcctgaagggcgacgtgagcatgtacctgctgctgaaggacggcggccggtaccggtgccagttcgacaccgtgtacaaggccaagagcgtgcccagcaagatgcccgagtggcacttcatccagcacaagctgctgcgggaggaccggagcgacgccaagaaccagaagtggcagctgaccgagcacgccatcgccttccccagcgccctggcctgagagctcgaatttccccgatcgttcaaacatttggcaataaagtttcttaagattgaatcctgttgccggtcttgcgatgattatcatataatttctgttgaattacgttaagcatgtaataattaacatgtaatgcatgacgttatttatgagatgggtttttatgattagagtcccgcaattatacatttaatacgcgatagaaaacaaaatatagcgcgcaaactaggataaattatcgcgcgcggtgtcatctatgttactagatcgggaattctagtggccggcccagctgatatctagacccagctttcttgtacaaagtggccgttaacggatcggccagaatggcccggaccgggttaccgaattcgagctcggtaccctgggatccgatatcgatgggccctggccgaagcttggtcacccggtccgggcctagaaggccagcttcggccgccccgggcaactttattatacaaagttgatggtacggatccgtcgacggcgcgccgcggacctgaattccagcacactggcggccgttagtctaaaaacggcccctaactaacgcttagttgcccgctagattagtcccccgttagtgcctagttagacacacgacgaactaggggctactagtaacggccgccagtgtgctcggtacggccagaatggccatctggattcagcagggggtgattgcggttacatcatgtacggaaaaataattctaatccttgatttaaatttgaacttgactatttatttattctttatttcattttgtaaatcattttatgtatctcctggcaagcaattttatccaccttgcaccaacaccttcgggttccataatcaaaccaccttaacttcacaccatgctgtaactcacaccgcccagcatctccaatgtgaaagaagctaaaatttaataaacaatcatacgaagcagtgacaaaataccagatggtattaatgcttcgataaaattaattggaaagtataaaatggtagaaaataataaattataattaatttaagtaagataaaaaataattaaaaactaaaatgttaaaattttaaaaaaattattttaaataatatttaaaaacattaaaaatcattttaaaaaatttatttatagaacaattaaataaatatttcagctaataaaaaacaaaagcttacctagccttagaagacaacttgtccaacaattagatgatacccattgcccttacgttttctttaacatcaattattgtttttgtcaacaagctatcttttagttttattttattggtaaaaaatatgtcgccttcaagttgcatcatttaacacatctcgtcattagaaaaataaaactcttccctaaacgattagtagaaaaaatcattcgataataaataagaaagaaaaattagaaaaaaataacttcattttaaaaaaatcattaaggctatattttttaaatgactaattttatatagactgtaactaaaagtatacaatttattatgctatgtatcttaaagaattacttataaaaatctacggaagaatatcttacaaagtgaaaaacaaatgagaaagaatttagtgggatgattatgattttatttgaaaattgaaaaaataattattaaagactttagtggagtaagaaagctttcctattagtcttttcttatccataaaaaaaaaaaaaaaaatctagcgtgacagcttttccatagattttaataatgtaaaatactggtagcagccgaccgttcaggtaatggacactgtggtcctaacttgcaacgggtgcgggcccaatttaataacgccgtggtaacggataaagccaagcgtgaagcggtgaaggtacatctctgactccgtcaagattacgaaaccgtcaactacgaaggactccccgaaatatcatctgtgtcataaacaccaagtcacaccatacatgggcacgcgtcacaatatgattggagaacggttccaccgcatatgctataaaatgcccccacacccctcgaccctaatcgcacttcaattgcaatcaaattagttcattctctttgcgcagttccctacctctcctttcaaggttcgtagatttcttccgtttttttttcttcttctttattgtttgttctacatcagcatgatgttgatttgattgtgttttctatcgtttcatcgattataaattttcataatcagaagattcagcttttattaatgcaagaacgtccttaattgatgattttataaccgtaaattaggtctaattagagtttttttcataaagattttcagatccgtttacaacaagccttaattgttgattctgtagtcgtagattaaggtttttttcatgaactacttcagatccgttaaacaacagccttatttgttgatacttcagtcgtttttcaagaaattgttcagatccgttgataaaagccttattcgttgattctgtatggtatttcaagagatattgctcaggtcctttagcaactaccttatttgttgattctgtggccatagattaggattttttttcacgaaattgcttcttgaaattacgtgatggattttgattctgatttatcttgtgattgttgactctacagccatggctgcaactactcttacatctgctttacctggtgctttcagttcatcccagagaccaagtgctcctttcaacttacaaagatcacctagagtgcttagaaggttcaacagaaagacaggacgtcaacctcgtggacttgttcgtgctgcaaaggctcaagcggcgcaaaacctgccagagaaattcgatgaaacaagactctgggaggccctcaggggatttggggttagtccaagtagggttacttacgctcccgtcggattcggagattaccactggaccgtcacagatgaagacgggagaccttggttcgcaactgtcagtgacctcgaacacaaagagcattgcgggcagggagcacaagcagcccttaaaggactcagacaagctatggacactgccctcgcacttagagatagggacggactcagattcgtggttgctccagtggcagcaacagatgggggtggccctgtccttccccttgacgctaggtatgcactcacagtcttccctcacgtcccaggaagaacaggagagttcggacaaagactcacagaggcagagagggacagactgcttgctcttctggcagaactccacggaagaacacctcctgaaacaaccccaccagccgatatggaaccaccaggacttcctggtgttagagcagcactcgccgaaagtgaaggaccttggagtggaggaccatttgcagaacccgctagacttcttctcagagaacacgaggccacactgcacgcaagactcgctgaattcgaagccctcgtcgcaagagttaagggtcgtggagcacctcttgtcgttacccacggagaaccacacccaggcaacttgatcctcggagaggaaggctatctcctcgtggactgggatacagttggactggctccagctgaaagggatttgagtctcatctcagacgacccagctgacctcgcaagatacgcagagcttacaggaagaactccagacccagacgcactcgcactctatagactgcgttggagtctccttgatgtggctgagttcgtcgagtggttcagggctgaacaccaaagaacccaagacaccgagagtgcatggaaggggttcactgacacacttgggcaattggctgctggtggatcagctgcatagcaaacttatctctgttatgaatcagaagaagttcatgtctcgtttcatttaaaactttggtggtttgtgttttggggccttgtaaagcccctgatgaataattgttcaactatgtttccgttcctgtgttatacctttctttctaatgagtaatgacatcaaacttcttctgtattgaaattatgtccttgtgagtctctttatcatcgtttcgtctttacattatatgtgctacttttgtctaatgagcctgaaaagtggctccaatggtacgcactggaagatttgttggcttctggtagatatagcgacagtgttgagcttgtaatatcatgtctcttattgctaaattagttcctttcttaacagaaaccttcaaagtttttgtttttgttttcatttacctaatgtacacatacgctggccatgactaacaacatgtccaggcttagagcatatttttttctagcttaaattgttaacttgtcattcagtaaaatccgagaattgtgaagctctaattgaagctaattcgttttataaagtcagttaaaaagtatactaaattatccaacttttcttcaaaatctcaaaattctatgacaaaacgatagtctttgtttatgtcagtaccacaaagaggtggaaaaaaacaccaaaaaaacaataagcaaactatacactgagaagaaaaataaaagagagctcaatagatgttttatactaacggtagattagatcaaagatccaagctttactctacatagagcagaacccagaatcccttcatatctcttttattctagcaccgataatctactgaaaagaagacacttagagctctgtctctttgtcaaagaagtcccagccgtcatccagaagctccttacgttcattaacagaggccgcaattggatcgggtttacttattttgtgggtatctatacttttattagatttttaatcaggctcctgatttctttttatttcgattgaattcctgaacttgtattattcagtagatcgaataaattataaaaagataaaatcataaaataatattttatcctatcaatcatattaaagcaatgaatatgtaaaattaatcttatctttattttaaaaaatcatataggtttagtatttttttaaaaataaagataggattagttttactattcactgcttattacttttaaaaaaatcataaaggtttagtatttttttaaaataaatataggaatagttttactattcactgctttaatagaaaaatagtttaaaatttaagatagttttaatcccagcatttgccacgtttgaacgtgagccgaaacgatgtcgttacattatcttaacctagctgaaacgatgtcgtcataatatcgccaaatgccaactggactacgtcgaacccacaaatcccacaaagcgcgtgaaatcaaatcgctcaaaccacaaaaaagaacaacgcgtttgttacacgctcaatcccacgcgagtagagcacagtaaccttcaaataagcgaatggggcataatcagaaatccgaaataaacctaggggcattatcggaaatgaaaagtagctcactcaatataaaaatctaggaaccctagttttcgttatcactctgtgctccctcgctctatttctcagtctctgtgtttgcggctgaggattccgaacgagtgaccttcttcgtttctcgcaaaggtaacagcctctgctcttgtctcttcgattcgatctatgcctgtctcttatttacgatgatgtttcttcggttatgtttttttatttatgctttatgctgttgatgttcggttgtttgtttcgctttgtttttgtggttcagttttttaggattcttttggtttttgaatcgattaatcggaagagattttcgagttatttggtgtgttggaggtgaatcttttttttgaggtcatagatctgttgtatttgtgttataaacatgcgactttgtatgattttttacgaggttatgatgttctggttgttttattatgaatctgttgagacagaaccatgatttttgttgatgttcgtttacactattaaaggtttgttttaacaggattaaaagttttttaagcatgttgaaggagtcttgtagatatgtaaccgtcgatagtttttttgtgggtttgttcacatgttatcaagcttaatcttttactatgtatgcgaccatatctggatccagcaaaggcgattttttaattccttgtgaaacttttgtaatatgaagttgaaattttgttattggtaaactataaatgtgtgaagttggagtatacctttaccttcttatttggctttgtgatagtttaatttatatgtattttgagttctgacttgtatttctttgaattgattctagtttaagtaatcatggcctcctccgagaacgtcatcaccgagttcatgcgcttcaaggtgcgcatggagggcaccgtgaacggccacgagttcgagatcgagggcgagggcgagggccgcccctacgagggccacaacaccgtgaagctgaaggtgacgaagggcggccccctgcccttcgcctgggacatcctgtccccccagttccagtacggctccaaggtgtacgtgaagcaccccgccgacatccccgactacaagaagctgtccttccccgagggcttcaagtgggagcgcgtgatgaacttcgaggacggcggcgtggcgaccgtgacccaggactcctccctgcaggacggctgcttcatctacaaggtgaagttcatcggcgtgaacttcccctccgacggccccgtgatgcagaagaagaccatgggctgggaggcctccaccgagcgcctgtacccccgcgacggcgtgctgaagggcgagacccacaaggccctgaagctgaaggacggcggccactacctggtggagttcaagtccatctacatggccaagaagcccgtgcagctgcccggctactactacgtggacgccaagctggacatcacctcccacaacgaggactacaccatcgtggagcagtacgagcgcaccgagggccgccaccacctgttcctgtagttttgtgatctgatgataagtggttggttcgtgtctcatgcacttgggaggtgatctatttcacctggtgtagtttgtgtttccgtcagttggaaaaacttatccctatcgatttcgttttcattttctgcttttcttttatgtaccttcgtttgggcttgtaacgggcctttgtatttcaactctcaataataatccaagtgcatgttaaacaatttgtcatctgtttcggctttgatatactactggtgaagatgggccgtactactgcatcacaacgaaaaataataataagatgaaaaacttgaagtggaaaaaaaaaaaaacttgaatgttcactactactcattgaccataatgtttaacatacatagctcaatagtatttttgtgaatatggcaacacaaacagtccaaaacaattgtctcttactataccaaaccaagggcgccgcttgtttgccactctttgtgtgcaatagtgtgattaccacatctccacattcaatatattccctgaattatctgacgattttgatggctcactgttttcccaagtcttgaattgtcttctgtgcgccagtcaaatgcatatgtgttgagtttatcttttaaatatcaagcttttgtttttaacttttgtttgtaaccaaaaactcacagtaggagtttgatcacataattttatgtttgcctttgcaatttctagtgagtctttgattaaaagcttgaaaagaaaatgcagccaagcttaccaagtaagttatgtgtattaaccagaggaagagagaatcttgcaaaatttcaacaaacacaaaaagaagtattactacgattggtggagaaagaaaacgattccaaatcttgaactgttgttgtaaaagcatagcagaaagtgggagacaaccgaaatagaaatgactataacttaatttaatgttatcattataatttcttctagcaaatatttagaaagtaaatatcacatcaacctttaatgtaattaagctttctctttttgattcatgtgagatgaaaagaaaaaaaagaagagaaaagtgtagaaaacacatcatttctaagctgaagctgaggtacaaattaattaataagtgactagggtcacgtgaccctagtcacttatgattccgatgacttcgtaggttcctagctcaagccgctcgtgtccaagcgtcacttacgattagctaatgattacggcatctaggaccgactagttcttatgtgcttctagtctccaaatgtggttgatagttattttgctctaagatcaacagtaatgaagtataaatcatcgttgtggtgtgctactcggttaattgagcattaacacacacaaacatgacgaggatggtataatctccaaaaatgtgtactttgttaggtgggaccctatagccttgattaatgtgctatgttaggcatgcctggaaacgtgtgacgcatatgttttgtgaacctgttgatattatatgtgcttttatattaccatattttattaaaatactaatatttattactagtaagatataacattctatctagcttaaaaactaaccataaatattccataataactagatttaccaaactaatatactaaatatacataataaatacaaaattaacaagacaataatcaatatttatgagcttaatatatttagacattatggttggtcgacgataatcatgctaacttttcgtaattgcttgattgaaatatgcttagaataatgcctctttgttctacatggcaaatagggaccattatggtgtaacaccctgggaaccacaaacaccccgaaatgctactaaactacacaactaaccttcatatataaaatttcgacagcatctcctttgaaaatttgcatagacgtggaagcaacagagtataaacagatctagctagctaagtttaaacggccggccaaacgtgcaagcgctactagacaattcagtacattaaaaacgtccgcaatgtgttattaagttgtctaagcgtcaatttatttacaattgaatatatcctgcca

SEQ ID NO: 173 - DNA, 16534 bp, Artificial Sequence
  RV027340 T-DNA
caaacaaacatacacagcgatttattcacacgaacccgaattacaacggtatatatcctgtcagccaacaccaaaacatcaaaaaaatcgggatcaggatcaggatctgcggccgcatcctgcaggtttaaacggccggccttcactagctagctgctaagctcaaacgagcaggaagcaacgagagggtggcgcgcgaccgacgtgcgtacgtagcatgagcctgagtggagacgttggacgtgtatgtatatacctctctgcgtgttaactatgtacgtaagcggcaggcagtgcaataagtgtggctctgtagtatgtacgtgcgggtacgatgctgtaagctactgaggcaagtccataaataaataatgacacgtgcgtgttctataatctcttcgcttcttcatttgtccccttgcggagtttggcatccattgatgccgttacgctgagaacagacacagcagacgaaccaaaagtgagttcttgtatgaaactatgacccttcatcgctaggctcaaacagcaccccgtacgaacacagcaaattagtcatctaactattagcccctacatgtttcagacgatacataaatatagcccatccttagcaattagctattggccctgcccatcccaagcaatgatctcgaagtatttttaatatatagtatttttaatatgtagcttttaaaattagaagataattttgagacaaaaatctccaagtatttttttgggtattttttactgcctccgtttttctttatttctcgtcacctagtttaattttgtgctaatcggctataaacgaaacagagagaaaagttactctaaaagcaactccaacagattagatataaatcttatatcctgcctagagctgttaaaaagatagacaactttagtggattagtgtatgcaacaaactctccaaatttaagtatcccaactacccaacgcatatcgttcccttttcattggcgcacgaactttcacctgctatagccgacgtacatgttcgttttttttgggcggcgcttactttcttccccgttcgttctcagcatcgcaactcaatttgttatggcggagaagcccttgtatcccaggtagtaatgcacagatatgcattattattattcataaaatcgagctagttaccctatgaggtgacatgaagcgctcacggttactatgacggttagcttcacgactgttggtggcagtagcgtacgacttagctatagttccggacttacctaactgactagagtcacacttagctgaccctagtcacttaggcgcgccaagcttggatctcctgcaggatctggccggccggatgggcggatctcgtacctcaactttgtatagaaaagttgggccagaatggcccggaccgggttaccaagcggccgctccattaattcatgtacacaaatttatttgtttaaagtatcattggatccattacacttcagttttcttagcatctttataaaactctcactttcatgatgttttttttttataatttaatatatcctgtatgttgaattttcagttagtcatctatattttgtcttaaattttgccttctttagcattaattaattgatttcttgcctctaatatctttcattcctctcctaatttgctttctgactttctgatttattgtattcttctttaaataatcttatcaatttctgcatagtcagagatgaaaccttcaagaaaacaataaagaggaaagattaaaggttagtattcccttgcctaccaaaaaaaacagaaaggtttgtattctcttcgtatatccttattttcattatacgtttggttttatatataaacacgtgtatatactttatagtagtagtatacatttacatattaatgtgtgtaataaaaacgtttaaatacgatgatgatgataagaaatagctggaaaaaattaatacatcacccaggccttatgtcacgttggttgtaagttgtataataactatatgttggtccgtcgcacaggtgcacagatataatactatttttttcatttcaatttttttttctttcttaatcgccaaatagtagtttacactttttcctgaagagtttttattttttgaaaatctactaatgattatatttaattaaattttgttttgttctcacgaaaatattgtttttttaataaacaggatagagttgggaatttatttgtacctactttttcccattttatttgctttgaacaaatgagtccaacatttctcttttcgtcttctctttcctatcccatctaaatcaaaactgatcaaaatacctcgaaattttaaattaaatcaccatccatcaaagctattatagtgtagaaattttaaagttttttctttggacaacaattgatttccatctacactacatatgatatgactcttgaatcaatcatagtttttatttcagtctgctgattagtttttttcttttcttttaaaagggtaaaaaatcggtagtttcgaataattttgagtatgtgaaaattcattatttttgggttggttattcaataacaaattaatttgtgattgtgatgtcttttttatgcaaggctcttttttcttgctttcaattagtgggtcctttgtttcctacaatcatctccaattcttctgtttgcttatatcattttgtatgatcttcaagaagaaagataaacgactccgaagaaagatttaagttattgttgttcatacaaaaagaaggttgtaaagttgttgacgtggacaaaagtattgccatatttttccagcctcgaagaaatttcccttcttcttcaaaccctaaattttgacaaaactctctacttttttttgcttctagggtttgctttcagtttccggagtataagaaaagccatggaaactcaacaacaacaagcagatattcaagattttgggaacaaaaacagtaacacctatgcatgcaggcaaagcagtactaggtggacacccacaagtgatcagatcagaatactgaaagagctctactacaacaatggaatcagatcaccaactgctgatcagattcagagaatcgctgctcaactcagacagtacggcaagattgaaggcaagaacgtgttttattggtttcagaaccataaagctcgtgaacgccagaagaaacggttcactcctactgctcctccaccaccgtctcacttctccgatcatattaaccaccatcttcccaacgctgcccccatgcagattccgtctcaccaccaccactaccaccatcaagaaccaccacatgtctatgctcaccctcacaaactctacaccactcatcacattggggttggttcttcttcacaaggagtgatgggtgtagggtgtggctatggatctgttgctatggagaagagtttcaggaagtgttcaatatcaccaccgggagagagtaaggccacaggaggaattggccggaatatcggttcaagatcacggataagtgtcgattcgtgttccttcttcgacacaattaagccaaagacatatgagatgtttgagaatcatgatcaagatgaagaacaaggagagccttcaactgagatcgaaacacttccattattcccgattcacgacggcaaccatcatgatttcttcggcatgaggacggcaaatctgcaattggagcaaggcactggaggttactacactggaggaagctggtatcggtctgatgagagggcgtctcttgagctcagtctcaactcatatggttattataactaattcgaactggccaggtacctgacatcttatagtctgcaacctctcgtgtctgaattcctatctttatcaagtgttattgcttccacgactataggacagctttcgtcgaaaggttttgctcatgtgatctcgaaggattcatctagtctgatttttcgtgacttgtatcggttttattggattcatccaacatatatcaataaaaaatgagttgtgtttcctttcttcctagttcagttaaaattatttccctcctgcgcttgtgctgtaattgtctgtgtacctgttgtttgtgactgtgttagttcccttggatatgatttcgtatttgatatgtacatggagatagcttagcttcattattggagtatgaagttagtatgacatagtcactctcctggaaaattgacactgcaaaccatatttttattctgaaccacaaatcctagtcagtccgctggcatatgccgtccgtttgctgaatccagaacgtgggtttggagatgtacggctgagatgcctctatgcgaaggggatttcgtggtgaaacgagatgggagtagagcaacgcccgtggaagatgcttcaaacttccacacttttgagcaacgatcggcagtagtaaggtagacgatttcaagatcaaagcatatgaagataaacaacatcaacaacaaaatttgttggggttctatagagagaaacagagctacatacatacactgttttgtatctaccatctgagatgatgaaaagatgaaaaactaaagaatgccccggcgccaacgccaggacacgccgcgcgcgcgtcacccgagccatctcttgacccagccggcgctgtatatttacacacgttgcagcatcgatcaccacctgttcgatcgcgtcgccgtcaccaagcttggcgcgccggtcacccggtccgggcctagaaggccacccggggctcggcgttaggcttttagtccgctaggtggctagaccgaggttaggacgctagttcactaggggcctagtggtgttttaaggatgggcaagtttgtacaaaaaagcaggctggcgccggaaccaattcagtcgagtgcggccgccagtgtgatggatatctcgacccgggtgattgcggttacatcatgtacggaaaaataattctaatccttgatttaaatttgaacttgactatttatttattctttatttcattttgtaaatcattttatgtatctcctggcaagcaattttatccaccttgcaccaacaccttcgggttccataatcaaaccaccttaacttcacaccatgctgtaactcacaccgcccagcatctccaatgtgaaagaagctaaaatttaataaacaatcatacgaagcagtgacaaaataccagatggtattaatgcttcgataaaattaattggaaagtataaaatggtagaaaataataaattataattaatttaagtaagataaaaaataattaaaaactaaaatgttaaaattttaaaaaaattattttaaataatatttaaaaacattaaaaatcattttaaaaaatttatttatagaacaattaaataaatatttcagctaataaaaaacaaaagcttacctagccttagaagacaacttgtccaacaattagatgatacccattgcccttacgttttctttaacatcaattattgtttttgtcaacaagctatcttttagttttattttattggtaaaaaatatgtcgccttcaagttgcatcatttaacacatctcgtcattagaaaaataaaactcttccctaaacgattagtagaaaaaatcattcgataataaataagaaagaaaaattagaaaaaaataacttcattttaaaaaaatcattaaggctatattttttaaatgactaattttatatagactgtaactaaaagtatacaatttattatgctatgtatcttaaagaattacttataaaaatctacggaagaatatcttacaaagtgaaaaacaaatgagaaagaatttagtgggatgattatgattttatttgaaaattgaaaaaataattattaaagactttagtggagtaagaaagctttcctattagtcttttcttatccataaaaaaaaaaaaaaaaatctagcgtgacagcttttccatagattttaataatgtaaaatactggtagcagccgaccgttcaggtaatggacactgtggtcctaacttgcaacgggtgcgggcccaatttaataacgccgtggtaacggataaagccaagcgtgaagcggtgaaggtacatctctgactccgtcaagattacgaaaccgtcaactacgaaggactccccgaaatatcatctgtgtcataaacaccaagtcacaccatacatgggcacgcgtcacaatatgattggagaacggttccaccgcatatgctataaaatgcccccacacccctcgaccctaatcgcacttcaattgcaatcaaattagttcattctctttgcgcagttccctacctctcctttcaaggttcgtagatttcttccgtttttttttcttcttctttattgtttgttctacatcagcatgatgttgatttgattgtgttttctatcgtttcatcgattataaattttcataatcagaagattcagcttttattaatgcaagaacgtccttaattgatgattttataaccgtaaattaggtctaattagagtttttttcataaagattttcagatccgtttacaacaagccttaattgttgattctgtagtcgtagattaaggtttttttcatgaactacttcagatccgttaaacaacagccttatttgttgatacttcagtcgtttttcaagaaattgttcagatccgttgataaaagccttattcgttgattctgtatggtatttcaagagatattgctcaggtcctttagcaactaccttatttgttgattctgtggccatagattaggattttttttcacgaaattgcttcttgaaattacgtgatggattttgattctgatttatcttgtgattgttgactctacagccatggcccacagcaagcacggcctgaaggaggagatgaccatgaagtaccacatggagggctgcgtgaacggccacaagttcgtgatcaccggcgagggcatcggctaccccttcaagggcaagcagaccatcaacctgtgcgtgatcgagggcggccccctgcccttcagcgaggacatcctgagcgccggcttcaagtacggcgaccggatcttcaccgagtacccccaggacatcgtggactacttcaagaacagctgccccgccggctacacctggggccggagcttcctgttcgaggacggcgccgtgtgcatctgtaacgtggacatcaccgtgagcgtgaaggagaactgcatctaccacaagagcatcttcaacggcgtgaacttccccgccgacggccccgtgatgaagaagatgaccaccaactgggaggccagctgcgagaagatcatgcccgtgcctaagcagggcatcctgaagggcgacgtgagcatgtacctgctgctgaaggacggcggccggtaccggtgccagttcgacaccgtgtacaaggccaagagcgtgcccagcaagatgcccgagtggcacttcatccagcacaagctgctgcgggaggaccggagcgacgccaagaaccagaagtggcagctgaccgagcacgccatcgccttccccagcgccctggcctgagagctcgaatttccccgatcgttcaaacatttggcaataaagtttcttaagattgaatcctgttgccggtcttgcgatgattatcatataatttctgttgaattacgttaagcatgtaataattaacatgtaatgcatgacgttatttatgagatgggtttttatgattagagtcccgcaattatacatttaatacgcgatagaaaacaaaatatagcgcgcaaactaggataaattatcgcgcgcggtgtcatctatgttactagatcgggaattctagtggccggcccagctgatatctagacccagctttcttgtacaaagtggccgttaacggatcggccagaatggcccggaccgggttaccgaattcgagctcggtaccctgggatccgatatcgatgggccctggccgaagcttggtcacccggtccgggcctagaaggccagcttcggccgccccgggcaactttattatacaaagttgatggtacggatccgtcgacggcgcgccgcggacctgaattccagcacactggcggccgttagtctaaaaacggcccctaactaacgcttagttgcccgctagattagtcccccgttagtgcctagttagacacacgacgaactaggggctactagtaacggccgccagtgtgctcggtacggccagaatggccatctggattcagcagggggtgattgcggttacatcatgtacggaaaaataattctaatccttgatttaaatttgaacttgactatttatttattctttatttcattttgtaaatcattttatgtatctcctggcaagcaattttatccaccttgcaccaacaccttcgggttccataatcaaaccaccttaacttcacaccatgctgtaactcacaccgcccagcatctccaatgtgaaagaagctaaaatttaataaacaatcatacgaagcagtgacaaaataccagatggtattaatgcttcgataaaattaattggaaagtataaaatggtagaaaataataaattataattaatttaagtaagataaaaaataattaaaaactaaaatgttaaaattttaaaaaaattattttaaataatatttaaaaacattaaaaatcattttaaaaaatttatttatagaacaattaaataaatatttcagctaataaaaaacaaaagcttacctagccttagaagacaacttgtccaacaattagatgatacccattgcccttacgttttctttaacatcaattattgtttttgtcaacaagctatcttttagttttattttattggtaaaaaatatgtcgccttcaagttgcatcatttaacacatctcgtcattagaaaaataaaactcttccctaaacgattagtagaaaaaatcattcgataataaataagaaagaaaaattagaaaaaaataacttcattttaaaaaaatcattaaggctatattttttaaatgactaattttatatagactgtaactaaaagtatacaatttattatgctatgtatcttaaagaattacttataaaaatctacggaagaatatcttacaaagtgaaaaacaaatgagaaagaatttagtgggatgattatgattttatttgaaaattgaaaaaataattattaaagactttagtggagtaagaaagctttcctattagtcttttcttatccataaaaaaaaaaaaaaaaatctagcgtgacagcttttccatagattttaataatgtaaaatactggtagcagccgaccgttcaggtaatggacactgtggtcctaacttgcaacgggtgcgggcccaatttaataacgccgtggtaacggataaagccaagcgtgaagcggtgaaggtacatctctgactccgtcaagattacgaaaccgtcaactacgaaggactccccgaaatatcatctgtgtcataaacaccaagtcacaccatacatgggcacgcgtcacaatatgattggagaacggttccaccgcatatgctataaaatgcccccacacccctcgaccctaatcgcacttcaattgcaatcaaattagttcattctctttgcgcagttccctacctctcctttcaaggttcgtagatttcttccgtttttttttcttcttctttattgtttgttctacatcagcatgatgttgatttgattgtgttttctatcgtttcatcgattataaattttcataatcagaagattcagcttttattaatgcaagaacgtccttaattgatgattttataaccgtaaattaggtctaattagagtttttttcataaagattttcagatccgtttacaacaagccttaattgttgattctgtagtcgtagattaaggtttttttcatgaactacttcagatccgttaaacaacagccttatttgttgatacttcagtcgtttttcaagaaattgttcagatccgttgataaaagccttattcgttgattctgtatggtatttcaagagatattgctcaggtcctttagcaactaccttatttgttgattctgtggccatagattaggattttttttcacgaaattgcttcttgaaattacgtgatggattttgattctgatttatcttgtgattgttgactctacagccatggctgcaactactcttacatctgctttacctggtgctttcagttcatcccagagaccaagtgctcctttcaacttacaaagatcacctagagtgcttagaaggttcaacagaaagacaggacgtcaacctcgtggacttgttcgtgctgcaaaggctcaagcggcgcaaaacctgccagagaaattcgatgaaacaagactctgggaggccctcaggggatttggggttagtccaagtagggttacttacgctcccgtcggattcggagattaccactggaccgtcacagatgaagacgggagaccttggttcgcaactgtcagtgacctcgaacacaaagagcattgcgggcagggagcacaagcagcccttaaaggactcagacaagctatggacactgccctcgcacttagagatagggacggactcagattcgtggttgctccagtggcagcaacagatgggggtggccctgtccttccccttgacgctaggtatgcactcacagtcttccctcacgtcccaggaagaacaggagagttcggacaaagactcacagaggcagagagggacagactgcttgctcttctggcagaactccacggaagaacacctcctgaaacaaccccaccagccgatatggaaccaccaggacttcctggtgttagagcagcactcgccgaaagtgaaggaccttggagtggaggaccatttgcagaacccgctagacttcttctcagagaacacgaggccacactgcacgcaagactcgctgaattcgaagccctcgtcgcaagagttaagggtcgtggagcacctcttgtcgttacccacggagaaccacacccaggcaacttgatcctcggagaggaaggctatctcctcgtggactgggatacagttggactggctccagctgaaagggatttgagtctcatctcagacgacccagctgacctcgcaagatacgcagagcttacaggaagaactccagacccagacgcactcgcactctatagactgcgttggagtctccttgatgtggctgagttcgtcgagtggttcagggctgaacaccaaagaacccaagacaccgagagtgcatggaaggggttcactgacacacttgggcaattggctgctggtggatcagctgcatagcaaacttatctctgttatgaatcagaagaagttcatgtctcgtttcatttaaaactttggtggtttgtgttttggggccttgtaaagcccctgatgaataattgttcaactatgtttccgttcctgtgttatacctttctttctaatgagtaatgacatcaaacttcttctgtattgaaattatgtccttgtgagtctctttatcatcgtttcgtctttacattatatgtgctacttttgtctaatgagcctgaaaagtggctccaatggtacgcactggaagatttgttggcttctggtagatatagcgacagtgttgagcttgtaatatcatgtctcttattgctaaattagttcctttcttaacagaaaccttcaaagtttttgtttttgttttcatttacctaatgtacacatacgctggccatgactaacaacatgtccaggcttagagcatatttttttctagcttaaattgttaacttgtcattcagtaaaatccgagaattgtgaagctctaattgaagctaattcgttttataaagtcagttaaaaagtatactaaattatccaacttttcttcaaaatctcaaaattctatgacaaaacgatagtctttgtttatgtcagtaccacaaagaggtggaaaaaaacaccaaaaaaacaataagcaaactatacactgagaagaaaaataaaagagagctcaatagatgttttatactaacggtagattagatcaaagatccaagctttactctacatagagcagaacccagaatcccttcatatctcttttattctagcaccgataatctactgaaaagaagacacttagagctctgtctctttgtcaaagaagtcccagccgtcatccagaagctccttacgttcattaacagaggccgcaattggatcgggtttacttattttgtgggtatctatacttttattagatttttaatcaggctcctgatttctttttatttcgattgaattcctgaacttgtattattcagtagatcgaataaattataaaaagataaaatcataaaataatattttatcctatcaatcatattaaagcaatgaatatgtaaaattaatcttatctttattttaaaaaatcatataggtttagtatttttttaaaaataaagataggattagttttactattcactgcttattacttttaaaaaaatcataaaggtttagtatttttttaaaataaatataggaatagttttactattcactgctttaatagaaaaatagtttaaaatttaagatagttttaatcccagcatttgccacgtttgaacgtgagccgaaacgatgtcgttacattatcttaacctagctgaaacgatgtcgtcataatatcgccaaatgccaactggactacgtcgaacccacaaatcccacaaagcgcgtgaaatcaaatcgctcaaaccacaaaaaagaacaacgcgtttgttacacgctcaatcccacgcgagtagagcacagtaaccttcaaataagcgaatggggcataatcagaaatccgaaataaacctaggggcattatcggaaatgaaaagtagctcactcaatataaaaatctaggaaccctagttttcgttatcactctgtgctccctcgctctatttctcagtctctgtgtttgcggctgaggattccgaacgagtgaccttcttcgtttctcgcaaaggtaacagcctctgctcttgtctcttcgattcgatctatgcctgtctcttatttacgatgatgtttcttcggttatgtttttttatttatgctttatgctgttgatgttcggttgtttgtttcgctttgtttttgtggttcagttttttaggattcttttggtttttgaatcgattaatcggaagagattttcgagttatttggtgtgttggaggtgaatcttttttttgaggtcatagatctgttgtatttgtgttataaacatgcgactttgtatgattttttacgaggttatgatgttctggttgttttattatgaatctgttgagacagaaccatgatttttgttgatgttcgtttacactattaaaggtttgttttaacaggattaaaagttttttaagcatgttgaaggagtcttgtagatatgtaaccgtcgatagtttttttgtgggtttgttcacatgttatcaagcttaatcttttactatgtatgcgaccatatctggatccagcaaaggcgattttttaattccttgtgaaacttttgtaatatgaagttgaaattttgttattggtaaactataaatgtgtgaagttggagtatacctttaccttcttatttggctttgtgatagtttaatttatatgtattttgagttctgacttgtatttctttgaattgattctagtttaagtaatcatggcctcctccgagaacgtcatcaccgagttcatgcgcttcaaggtgcgcatggagggcaccgtgaacggccacgagttcgagatcgagggcgagggcgagggccgcccctacgagggccacaacaccgtgaagctgaaggtgacgaagggcggccccctgcccttcgcctgggacatcctgtccccccagttccagtacggctccaaggtgtacgtgaagcaccccgccgacatccccgactacaagaagctgtccttccccgagggcttcaagtgggagcgcgtgatgaacttcgaggacggcggcgtggcgaccgtgacccaggactcctccctgcaggacggctgcttcatctacaaggtgaagttcatcggcgtgaacttcccctccgacggccccgtgatgcagaagaagaccatgggctgggaggcctccaccgagcgcctgtacccccgcgacggcgtgctgaagggcgagacccacaaggccctgaagctgaaggacggcggccactacctggtggagttcaagtccatctacatggccaagaagcccgtgcagctgcccggctactactacgtggacgccaagctggacatcacctcccacaacgaggactacaccatcgtggagcagtacgagcgcaccgagggccgccaccacctgttcctgtagttttgtgatctgatgataagtggttggttcgtgtctcatgcacttgggaggtgatctatttcacctggtgtagtttgtgtttccgtcagttggaaaaacttatccctatcgatttcgttttcattttctgcttttcttttatgtaccttcgtttgggcttgtaacgggcctttgtatttcaactctcaataataatccaagtgcatgttaaacaatttgtcatctgtttcggctttgatatactactggtgaagatgggccgtactactgcatcacaacgaaaaataataataagatgaaaaacttgaagtggaaaaaaaaaaaaacttgaatgttcactactactcattgaccataatgtttaacatacatagctcaatagtatttttgtgaatatggcaacacaaacagtccaaaacaattgtctcttactataccaaaccaagggcgccgcttgtttgccactctttgtgtgcaatagtgtgattaccacatctccacattcaatatattccctgaattatctgacgattttgatggctcactgttttcccaagtcttgaattgtcttctgtgcgccagtcaaatgcatatgtgttgagtttatcttttaaatatcaagcttttgtttttaacttttgtttgtaaccaaaaactcacagtaggagtttgatcacataattttatgtttgcctttgcaatttctagtgagtctttgattaaaagcttgaaaagaaaatgcagccaagcttaccaagtaagttatgtgtattaaccagaggaagagagaatcttgcaaaatttcaacaaacacaaaaagaagtattactacgattggtggagaaagaaaacgattccaaatcttgaactgttgttgtaaaagcatagcagaaagtgggagacaaccgaaatagaaatgactataacttaatttaatgttatcattataatttcttctagcaaatatttagaaagtaaatatcacatcaacctttaatgtaattaagctttctctttttgattcatgtgagatgaaaagaaaaaaaagaagagaaaagtgtagaaaacacatcatttctaagctgaagctgaggtacaaattaattaataagtgactagggtcacgtgaccctagtcacttatgattccgatgacttcgtaggttcctagctcaagccgctcgtgtccaagcgtcacttacgattagctaatgattacggcatctaggaccgactagttcttatgtgcttctagtctccaaatgtggttgatagttattttgctctaagatcaacagtaatgaagtataaatcatcgttgtggtgtgctactcggttaattgagcattaacacacacaaacatgacgaggatggtataatctccaaaaatgtgtactttgttaggtgggaccctatagccttgattaatgtgctatgttaggcatgcctggaaacgtgtgacgcatatgttttgtgaacctgttgatattatatgtgcttttatattaccatattttattaaaatactaatatttattactagtaagatataacattctatctagcttaaaaactaaccataaatattccataataactagatttaccaaactaatatactaaatatacataataaatacaaaattaacaagacaataatcaatatttatgagcttaatatatttagacattatggttggtcgacgataatcatgctaacttttcgtaattgcttgattgaaatatgcttagaataatgcctctttgttctacatggcaaatagggaccattatggtgtaacaccctgggaaccacaaacaccccgaaatgctactaaactacacaactaaccttcatatataaaatttcgacagcatctcctttgaaaatttgcatagacgtggaagcaacagagtataaacagatctagctagctaagtttaaacggccggccaaacgtgcaagcgctactagacaattcagtacattaaaaacgtccgcaatgtgttattaagttgtctaagcgtcaatttatttacaattgaatatatcctgcca

SEQ ID NO: 174 - DNA, 16534 bp, Artificial Sequence
  RV027342 T-DNA
caaacaaacatacacagcgatttattcacacgaacccgaattacaacggtatatatcctgtcagccaacaccaaaacatcaaaaaaatcgggatcaggatcaggatctgcggccgcatcctgcaggtttaaacggccggccttcactagctagctgctaagctcaaacgagcaggaagcaacgagagggtggcgcgcgaccgacgtgcgtacgtagcatgagcctgagtggagacgttggacgtgtatgtatatacctctctgcgtgttaactatgtacgtaagcggcaggcagtgcaataagtgtggctctgtagtatgtacgtgcgggtacgatgctgtaagctactgaggcaagtccataaataaataatgacacgtgcgtgttctataatctcttcgcttcttcatttgtccccttgcggagtttggcatccattgatgccgttacgctgagaacagacacagcagacgaaccaaaagtgagttcttgtatgaaactatgacccttcatcgctaggctcaaacagcaccccgtacgaacacagcaaattagtcatctaactattagcccctacatgtttcagacgatacataaatatagcccatccttagcaattagctattggccctgcccatcccaagcaatgatctcgaagtatttttaatatatagtatttttaatatgtagcttttaaaattagaagataattttgagacaaaaatctccaagtatttttttgggtattttttactgcctccgtttttctttatttctcgtcacctagtttaattttgtgctaatcggctataaacgaaacagagagaaaagttactctaaaagcaactccaacagattagatataaatcttatatcctgcctagagctgttaaaaagatagacaactttagtggattagtgtatgcaacaaactctccaaatttaagtatcccaactacccaacgcatatcgttcccttttcattggcgcacgaactttcacctgctatagccgacgtacatgttcgttttttttgggcggcgcttactttcttccccgttcgttctcagcatcgcaactcaatttgttatggcggagaagcccttgtatcccaggtagtaatgcacagatatgcattattattattcataaaatcgagctagttaccctatgaggtgacatgaagcgctcacggttactatgacggttagcttcacgactgttggtggcagtagcgtacgacttagctatagttccggacttacctaactgactagagtcacacttagctgaccctagtcacttaggcgcgccaagcttggatctcctgcaggatctggccggccggatgggcggatctcgtacctcaactttgtatagaaaagttgggccagaatggcccggaccgggttaccaagcggccgctttattttatatgtttaattttatagaatctaactagcttattttgagattaaattgtttagttacttttataacagtataaatgtataatgaggacctaagaatgtagtcctgtaatgttcttgctattctacttaatctcatcaccaatcaaccatcaaaagaagctagtactaataaaacctgcaggtattcgaataataattaagctcaaacactatactaatttatggaggattatatattcaatgaattaggaacctcatgatggacattattgactgatataatgtgtatactaattgtgagtatttaaaaaccatacaaagcatttatatgtccacatatattggacacacatgcaatcaatgttcaatatgctccacacacagaaataaaaatactctttctgatcatatgatacatcatacatatactaaaaaaatctaaaatgaactataaccacaagcatatataataacaatgaaatggtaatgtttcttcatttttatttgttcaaattcttattcggttgttttttcttaccctacgagaatccgtgaggtcaaagggaaacagtgattttttttttgtattttgttttttaaattgatgaactgtaaaactctctctctagaaaaatatataagtagtagtatgaattttctctcactaaaagcattaatggacctttcgataatcataaatgcaatgcaccctctctatgcatttcgcaataactccttttccttctgccacatcctcttcctcacctctttctcttcttccctttctcctaagttcctcctccaccaaattctccatttatttcgttaactatcctccatttgttttcttctgaagagtgatatattctacctttctctggttaaagaaactccctgaatccaccggttatgtcttgaccggctataagcctataaactgatgccctaagacacctttttaggtttctcaataattctccgcatctatcttttcttctccacaagtaagagaaccagaaaaccagagaagaagccgagctagctagggtttcattgtgtgcacaaaagtaagatctctctctctaaccaatacttgtgtaatttgtctttgtttctttgagcaaatattgcatgtttgttcatattagccggatccgttttatattttttcatgatctacattttatctttattttgtttgtaaattaatgagttttttttttttttttctgtttttgtcacgatctaaaaaacaagcgttacaaagaagaagaaaaacctttttggagttagaagtgtaaaaggggtttcagtttgacgaattttccttagtagttgtgtaaaaaaaggccattgacttaatgtcaactctatatatctacacatttttttattaattagtttttgtttttttcccacttcatttacctttagtcaatgaatttttactgaaaacgttttttcaaggtcaatttcactgagttaaaaaaaaccatggaaactcaacaacaacaagcagatattcaagattttgggaacaaaaacagtaacacctatgcatgcaggcaaagcagtactaggtggacacccacaagtgatcagatcagaatactgaaagagctctactacaacaatggaatcagatcaccaactgctgatcagattcagagaatcgctgctcaactcagacagtacggcaagattgaaggcaagaacgtgttttattggtttcagaaccataaagctcgtgaacgccagaagaaacggttcactcctactgctcctccaccaccgtctcacttctccgatcatattaaccaccatcttcccaacgctgcccccatgcagattccgtctcaccaccaccactaccaccatcaagaaccaccacatgtctatgctcaccctcacaaactctacaccactcatcacattggggttggttcttcttcacaaggagtgatgggtgtagggtgtggctatggatctgttgctatggagaagagtttcaggaagtgttcaatatcaccaccgggagagagtaaggccacaggaggaattggccggaatatcggttcaagatcacggataagtgtcgattcgtgttccttcttcgacacaattaagccaaagacatatgagatgtttgagaatcatgatcaagatgaagaacaaggagagccttcaactgagatcgaaacacttccattattcccgattcacgacggcaaccatcatgatttcttcggcatgaggacggcaaatctgcaattggagcaaggcactggaggttactacactggaggaagctggtatcggtctgatgagagggcgtctcttgagctcagtctcaactcatatggttattataactaattcgaactggccaggtacctgacatcttatagtctgcaacctctcgtgtctgaattcctatctttatcaagtgttattgcttccacgactataggacagctttcgtcgaaaggttttgctcatgtgatctcgaaggattcatctagtctgatttttcgtgacttgtatcggttttattggattcatccaacatatatcaataaaaaatgagttgtgtttcctttcttcctagttcagttaaaattatttccctcctgcgcttgtgctgtaattgtctgtgtacctgttgtttgtgactgtgttagttcccttggatatgatttcgtatttgatatgtacatggagatagcttagcttcattattggagtatgaagttagtatgacatagtcactctcctggaaaattgacactgcaaaccatatttttattctgaaccacaaatcctagtcagtccgctggcatatgccgtccgtttgctgaatccagaacgtgggtttggagatgtacggctgagatgcctctatgcgaaggggatttcgtggtgaaacgagatgggagtagagcaacgcccgtggaagatgcttcaaacttccacacttttgagcaacgatcggcagtagtaaggtagacgatttcaagatcaaagcatatgaagataaacaacatcaacaacaaaatttgttggggttctatagagagaaacagagctacatacatacactgttttgtatctaccatctgagatgatgaaaagatgaaaaactaaagaatgccccggcgccaacgccaggacacgccgcgcgcgcgtcacccgagccatctcttgacccagccggcgctgtatatttacacacgttgcagcatcgatcaccacctgttcgatcgcgtcgccgtcaccaagcttggcgcgccggtcacccggtccgggcctagaaggccacccggggctcggcgttaggcttttagtccgctaggtggctagaccgaggttaggacgctagttcactaggggcctagtggtgttttaaggatgggcaagtttgtacaaaaaagcaggctggcgccggaaccaattcagtcgagtgcggccgccagtgtgatggatatctcgacccgggtgattgcggttacatcatgtacggaaaaataattctaatccttgatttaaatttgaacttgactatttatttattctttatttcattttgtaaatcattttatgtatctcctggcaagcaattttatccaccttgcaccaacaccttcgggttccataatcaaaccaccttaacttcacaccatgctgtaactcacaccgcccagcatctccaatgtgaaagaagctaaaatttaataaacaatcatacgaagcagtgacaaaataccagatggtattaatgcttcgataaaattaattggaaagtataaaatggtagaaaataataaattataattaatttaagtaagataaaaaataattaaaaactaaaatgttaaaattttaaaaaaattattttaaataatatttaaaaacattaaaaatcattttaaaaaatttatttatagaacaattaaataaatatttcagctaataaaaaacaaaagcttacctagccttagaagacaacttgtccaacaattagatgatacccattgcccttacgttttctttaacatcaattattgtttttgtcaacaagctatcttttagttttattttattggtaaaaaatatgtcgccttcaagttgcatcatttaacacatctcgtcattagaaaaataaaactcttccctaaacgattagtagaaaaaatcattcgataataaataagaaagaaaaattagaaaaaaataacttcattttaaaaaaatcattaaggctatattttttaaatgactaattttatatagactgtaactaaaagtatacaatttattatgctatgtatcttaaagaattacttataaaaatctacggaagaatatcttacaaagtgaaaaacaaatgagaaagaatttagtgggatgattatgattttatttgaaaattgaaaaaataattattaaagactttagtggagtaagaaagctttcctattagtcttttcttatccataaaaaaaaaaaaaaaaatctagcgtgacagcttttccatagattttaataatgtaaaatactggtagcagccgaccgttcaggtaatggacactgtggtcctaacttgcaacgggtgcgggcccaatttaataacgccgtggtaacggataaagccaagcgtgaagcggtgaaggtacatctctgactccgtcaagattacgaaaccgtcaactacgaaggactccccgaaatatcatctgtgtcataaacaccaagtcacaccatacatgggcacgcgtcacaatatgattggagaacggttccaccgcatatgctataaaatgcccccacacccctcgaccctaatcgcacttcaattgcaatcaaattagttcattctctttgcgcagttccctacctctcctttcaaggttcgtagatttcttccgtttttttttcttcttctttattgtttgttctacatcagcatgatgttgatttgattgtgttttctatcgtttcatcgattataaattttcataatcagaagattcagcttttattaatgcaagaacgtccttaattgatgattttataaccgtaaattaggtctaattagagtttttttcataaagattttcagatccgtttacaacaagccttaattgttgattctgtagtcgtagattaaggtttttttcatgaactacttcagatccgttaaacaacagccttatttgttgatacttcagtcgtttttcaagaaattgttcagatccgttgataaaagccttattcgttgattctgtatggtatttcaagagatattgctcaggtcctttagcaactaccttatttgttgattctgtggccatagattaggattttttttcacgaaattgcttcttgaaattacgtgatggattttgattctgatttatcttgtgattgttgactctacagccatggcccacagcaagcacggcctgaaggaggagatgaccatgaagtaccacatggagggctgcgtgaacggccacaagttcgtgatcaccggcgagggcatcggctaccccttcaagggcaagcagaccatcaacctgtgcgtgatcgagggcggccccctgcccttcagcgaggacatcctgagcgccggcttcaagtacggcgaccggatcttcaccgagtacccccaggacatcgtggactacttcaagaacagctgccccgccggctacacctggggccggagcttcctgttcgaggacggcgccgtgtgcatctgtaacgtggacatcaccgtgagcgtgaaggagaactgcatctaccacaagagcatcttcaacggcgtgaacttccccgccgacggccccgtgatgaagaagatgaccaccaactgggaggccagctgcgagaagatcatgcccgtgcctaagcagggcatcctgaagggcgacgtgagcatgtacctgctgctgaaggacggcggccggtaccggtgccagttcgacaccgtgtacaaggccaagagcgtgcccagcaagatgcccgagtggcacttcatccagcacaagctgctgcgggaggaccggagcgacgccaagaaccagaagtggcagctgaccgagcacgccatcgccttccccagcgccctggcctgagagctcgaatttccccgatcgttcaaacatttggcaataaagtttcttaagattgaatcctgttgccggtcttgcgatgattatcatataatttctgttgaattacgttaagcatgtaataattaacatgtaatgcatgacgttatttatgagatgggtttttatgattagagtcccgcaattatacatttaatacgcgatagaaaacaaaatatagcgcgcaaactaggataaattatcgcgcgcggtgtcatctatgttactagatcgggaattctagtggccggcccagctgatatctagacccagctttcttgtacaaagtggccgttaacggatcggccagaatggcccggaccgggttaccgaattcgagctcggtaccctgggatccgatatcgatgggccctggccgaagcttggtcacccggtccgggcctagaaggccagcttcggccgccccgggcaactttattatacaaagttgatggtacggatccgtcgacggcgcgccgcggacctgaattccagcacactggcggccgttagtctaaaaacggcccctaactaacgcttagttgcccgctagattagtcccccgttagtgcctagttagacacacgacgaactaggggctactagtaacggccgccagtgtgctcggtacggccagaatggccatctggattcagcagggggtgattgcggttacatcatgtacggaaaaataattctaatccttgatttaaatttgaacttgactatttatttattctttatttcattttgtaaatcattttatgtatctcctggcaagcaattttatccaccttgcaccaacaccttcgggttccataatcaaaccaccttaacttcacaccatgctgtaactcacaccgcccagcatctccaatgtgaaagaagctaaaatttaataaacaatcatacgaagcagtgacaaaataccagatggtattaatgcttcgataaaattaattggaaagtataaaatggtagaaaataataaattataattaatttaagtaagataaaaaataattaaaaactaaaatgttaaaattttaaaaaaattattttaaataatatttaaaaacattaaaaatcattttaaaaaatttatttatagaacaattaaataaatatttcagctaataaaaaacaaaagcttacctagccttagaagacaacttgtccaacaattagatgatacccattgcccttacgttttctttaacatcaattattgtttttgtcaacaagctatcttttagttttattttattggtaaaaaatatgtcgccttcaagttgcatcatttaacacatctcgtcattagaaaaataaaactcttccctaaacgattagtagaaaaaatcattcgataataaataagaaagaaaaattagaaaaaaataacttcattttaaaaaaatcattaaggctatattttttaaatgactaattttatatagactgtaactaaaagtatacaatttattatgctatgtatcttaaagaattacttataaaaatctacggaagaatatcttacaaagtgaaaaacaaatgagaaagaatttagtgggatgattatgattttatttgaaaattgaaaaaataattattaaagactttagtggagtaagaaagctttcctattagtcttttcttatccataaaaaaaaaaaaaaaaatctagcgtgacagcttttccatagattttaataatgtaaaatactggtagcagccgaccgttcaggtaatggacactgtggtcctaacttgcaacgggtgcgggcccaatttaataacgccgtggtaacggataaagccaagcgtgaagcggtgaaggtacatctctgactccgtcaagattacgaaaccgtcaactacgaaggactccccgaaatatcatctgtgtcataaacaccaagtcacaccatacatgggcacgcgtcacaatatgattggagaacggttccaccgcatatgctataaaatgcccccacacccctcgaccctaatcgcacttcaattgcaatcaaattagttcattctctttgcgcagttccctacctctcctttcaaggttcgtagatttcttccgtttttttttcttcttctttattgtttgttctacatcagcatgatgttgatttgattgtgttttctatcgtttcatcgattataaattttcataatcagaagattcagcttttattaatgcaagaacgtccttaattgatgattttataaccgtaaattaggtctaattagagtttttttcataaagattttcagatccgtttacaacaagccttaattgttgattctgtagtcgtagattaaggtttttttcatgaactacttcagatccgttaaacaacagccttatttgttgatacttcagtcgtttttcaagaaattgttcagatccgttgataaaagccttattcgttgattctgtatggtatttcaagagatattgctcaggtcctttagcaactaccttatttgttgattctgtggccatagattaggattttttttcacgaaattgcttcttgaaattacgtgatggattttgattctgatttatcttgtgattgttgactctacagccatggctgcaactactcttacatctgctttacctggtgctttcagttcatcccagagaccaagtgctcctttcaacttacaaagatcacctagagtgcttagaaggttcaacagaaagacaggacgtcaacctcgtggacttgttcgtgctgcaaaggctcaagcggcgcaaaacctgccagagaaattcgatgaaacaagactctgggaggccctcaggggatttggggttagtccaagtagggttacttacgctcccgtcggattcggagattaccactggaccgtcacagatgaagacgggagaccttggttcgcaactgtcagtgacctcgaacacaaagagcattgcgggcagggagcacaagcagcccttaaaggactcagacaagctatggacactgccctcgcacttagagatagggacggactcagattcgtggttgctccagtggcagcaacagatgggggtggccctgtccttccccttgacgctaggtatgcactcacagtcttccctcacgtcccaggaagaacaggagagttcggacaaagactcacagaggcagagagggacagactgcttgctcttctggcagaactccacggaagaacacctcctgaaacaaccccaccagccgatatggaaccaccaggacttcctggtgttagagcagcactcgccgaaagtgaaggaccttggagtggaggaccatttgcagaacccgctagacttcttctcagagaacacgaggccacactgcacgcaagactcgctgaattcgaagccctcgtcgcaagagttaagggtcgtggagcacctcttgtcgttacccacggagaaccacacccaggcaacttgatcctcggagaggaaggctatctcctcgtggactgggatacagttggactggctccagctgaaagggatttgagtctcatctcagacgacccagctgacctcgcaagatacgcagagcttacaggaagaactccagacccagacgcactcgcactctatagactgcgttggagtctccttgatgtggctgagttcgtcgagtggttcagggctgaacaccaaagaacccaagacaccgagagtgcatggaaggggttcactgacacacttgggcaattggctgctggtggatcagctgcatagcaaacttatctctgttatgaatcagaagaagttcatgtctcgtttcatttaaaactttggtggtttgtgttttggggccttgtaaagcccctgatgaataattgttcaactatgtttccgttcctgtgttatacctttctttctaatgagtaatgacatcaaacttcttctgtattgaaattatgtccttgtgagtctctttatcatcgtttcgtctttacattatatgtgctacttttgtctaatgagcctgaaaagtggctccaatggtacgcactggaagatttgttggcttctggtagatatagcgacagtgttgagcttgtaatatcatgtctcttattgctaaattagttcctttcttaacagaaaccttcaaagtttttgtttttgttttcatttacctaatgtacacatacgctggccatgactaacaacatgtccaggcttagagcatatttttttctagcttaaattgttaacttgtcattcagtaaaatccgagaattgtgaagctctaattgaagctaattcgttttataaagtcagttaaaaagtatactaaattatccaacttttcttcaaaatctcaaaattctatgacaaaacgatagtctttgtttatgtcagtaccacaaagaggtggaaaaaaacaccaaaaaaacaataagcaaactatacactgagaagaaaaataaaagagagctcaatagatgttttatactaacggtagattagatcaaagatccaagctttactctacatagagcagaacccagaatcccttcatatctcttttattctagcaccgataatctactgaaaagaagacacttagagctctgtctctttgtcaaagaagtcccagccgtcatccagaagctccttacgttcattaacagaggccgcaattggatcgggtttacttattttgtgggtatctatacttttattagatttttaatcaggctcctgatttctttttatttcgattgaattcctgaacttgtattattcagtagatcgaataaattataaaaagataaaatcataaaataatattttatcctatcaatcatattaaagcaatgaatatgtaaaattaatcttatctttattttaaaaaatcatataggtttagtatttttttaaaaataaagataggattagttttactattcactgcttattacttttaaaaaaatcataaaggtttagtatttttttaaaataaatataggaatagttttactattcactgctttaatagaaaaatagtttaaaatttaagatagttttaatcccagcatttgccacgtttgaacgtgagccgaaacgatgtcgttacattatcttaacctagctgaaacgatgtcgtcataatatcgccaaatgccaactggactacgtcgaacccacaaatcccacaaagcgcgtgaaatcaaatcgctcaaaccacaaaaaagaacaacgcgtttgttacacgctcaatcccacgcgagtagagcacagtaaccttcaaataagcgaatggggcataatcagaaatccgaaataaacctaggggcattatcggaaatgaaaagtagctcactcaatataaaaatctaggaaccctagttttcgttatcactctgtgctccctcgctctatttctcagtctctgtgtttgcggctgaggattccgaacgagtgaccttcttcgtttctcgcaaaggtaacagcctctgctcttgtctcttcgattcgatctatgcctgtctcttatttacgatgatgtttcttcggttatgtttttttatttatgctttatgctgttgatgttcggttgtttgtttcgctttgtttttgtggttcagttttttaggattcttttggtttttgaatcgattaatcggaagagattttcgagttatttggtgtgttggaggtgaatcttttttttgaggtcatagatctgttgtatttgtgttataaacatgcgactttgtatgattttttacgaggttatgatgttctggttgttttattatgaatctgttgagacagaaccatgatttttgttgatgttcgtttacactattaaaggtttgttttaacaggattaaaagttttttaagcatgttgaaggagtcttgtagatatgtaaccgtcgatagtttttttgtgggtttgttcacatgttatcaagcttaatcttttactatgtatgcgaccatatctggatccagcaaaggcgattttttaattccttgtgaaacttttgtaatatgaagttgaaattttgttattggtaaactataaatgtgtgaagttggagtatacctttaccttcttatttggctttgtgatagtttaatttatatgtattttgagttctgacttgtatttctttgaattgattctagtttaagtaatcatggcctcctccgagaacgtcatcaccgagttcatgcgcttcaaggtgcgcatggagggcaccgtgaacggccacgagttcgagatcgagggcgagggcgagggccgcccctacgagggccacaacaccgtgaagctgaaggtgacgaagggcggccccctgcccttcgcctgggacatcctgtccccccagttccagtacggctccaaggtgtacgtgaagcaccccgccgacatccccgactacaagaagctgtccttccccgagggcttcaagtgggagcgcgtgatgaacttcgaggacggcggcgtggcgaccgtgacccaggactcctccctgcaggacggctgcttcatctacaaggtgaagttcatcggcgtgaacttcccctccgacggccccgtgatgcagaagaagaccatgggctgggaggcctccaccgagcgcctgtacccccgcgacggcgtgctgaagggcgagacccacaaggccctgaagctgaaggacggcggccactacctggtggagttcaagtccatctacatggccaagaagcccgtgcagctgcccggctactactacgtggacgccaagctggacatcacctcccacaacgaggactacaccatcgtggagcagtacgagcgcaccgagggccgccaccacctgttcctgtagttttgtgatctgatgataagtggttggttcgtgtctcatgcacttgggaggtgatctatttcacctggtgtagtttgtgtttccgtcagttggaaaaacttatccctatcgatttcgttttcattttctgcttttcttttatgtaccttcgtttgggcttgtaacgggcctttgtatttcaactctcaataataatccaagtgcatgttaaacaatttgtcatctgtttcggctttgatatactactggtgaagatgggccgtactactgcatcacaacgaaaaataataataagatgaaaaacttgaagtggaaaaaaaaaaaaacttgaatgttcactactactcattgaccataatgtttaacatacatagctcaatagtatttttgtgaatatggcaacacaaacagtccaaaacaattgtctcttactataccaaaccaagggcgccgcttgtttgccactctttgtgtgcaatagtgtgattaccacatctccacattcaatatattccctgaattatctgacgattttgatggctcactgttttcccaagtcttgaattgtcttctgtgcgccagtcaaatgcatatgtgttgagtttatcttttaaatatcaagcttttgtttttaacttttgtttgtaaccaaaaactcacagtaggagtttgatcacataattttatgtttgcctttgcaatttctagtgagtctttgattaaaagcttgaaaagaaaatgcagccaagcttaccaagtaagttatgtgtattaaccagaggaagagagaatcttgcaaaatttcaacaaacacaaaaagaagtattactacgattggtggagaaagaaaacgattccaaatcttgaactgttgttgtaaaagcatagcagaaagtgggagacaaccgaaatagaaatgactataacttaatttaatgttatcattataatttcttctagcaaatatttagaaagtaaatatcacatcaacctttaatgtaattaagctttctctttttgattcatgtgagatgaaaagaaaaaaaagaagagaaaagtgtagaaaacacatcatttctaagctgaagctgaggtacaaattaattaataagtgactagggtcacgtgaccctagtcacttatgattccgatgacttcgtaggttcctagctcaagccgctcgtgtccaagcgtcacttacgattagctaatgattacggcatctaggaccgactagttcttatgtgcttctagtctccaaatgtggttgatagttattttgctctaagatcaacagtaatgaagtataaatcatcgttgtggtgtgctactcggttaattgagcattaacacacacaaacatgacgaggatggtataatctccaaaaatgtgtactttgttaggtgggaccctatagccttgattaatgtgctatgttaggcatgcctggaaacgtgtgacgcatatgttttgtgaacctgttgatattatatgtgcttttatattaccatattttattaaaatactaatatttattactagtaagatataacattctatctagcttaaaaactaaccataaatattccataataactagatttaccaaactaatatactaaatatacataataaatacaaaattaacaagacaataatcaatatttatgagcttaatatatttagacattatggttggtcgacgataatcatgctaacttttcgtaattgcttgattgaaatatgcttagaataatgcctctttgttctacatggcaaatagggaccattatggtgtaacaccctgggaaccacaaacaccccgaaatgctactaaactacacaactaaccttcatatataaaatttcgacagcatctcctttgaaaatttgcatagacgtggaagcaacagagtataaacagatctagctagctaagtttaaacggccggccaaacgtgcaagcgctactagacaattcagtacattaaaaacgtccgcaatgtgttattaagttgtctaagcgtcaatttatttacaattgaatatatcctgcca

SEQ ID NO: 175 - DNA, 16534 bp, Artificial Sequence
  RV027343 T-DNA
caaacaaacatacacagcgatttattcacacgaacccgaattacaacggtatatatcctgtcagccaacaccaaaacatcaaaaaaatcgggatcaggatcaggatctgcggccgcatcctgcaggtttaaacggccggccttcactagctagctgctaagctcaaacgagcaggaagcaacgagagggtggcgcgcgaccgacgtgcgtacgtagcatgagcctgagtggagacgttggacgtgtatgtatatacctctctgcgtgttaactatgtacgtaagcggcaggcagtgcaataagtgtggctctgtagtatgtacgtgcgggtacgatgctgtaagctactgaggcaagtccataaataaataatgacacgtgcgtgttctataatctcttcgcttcttcatttgtccccttgcggagtttggcatccattgatgccgttacgctgagaacagacacagcagacgaaccaaaagtgagttcttgtatgaaactatgacccttcatcgctaggctcaaacagcaccccgtacgaacacagcaaattagtcatctaactattagcccctacatgtttcagacgatacataaatatagcccatccttagcaattagctattggccctgcccatcccaagcaatgatctcgaagtatttttaatatatagtatttttaatatgtagcttttaaaattagaagataattttgagacaaaaatctccaagtatttttttgggtattttttactgcctccgtttttctttatttctcgtcacctagtttaattttgtgctaatcggctataaacgaaacagagagaaaagttactctaaaagcaactccaacagattagatataaatcttatatcctgcctagagctgttaaaaagatagacaactttagtggattagtgtatgcaacaaactctccaaatttaagtatcccaactacccaacgcatatcgttcccttttcattggcgcacgaactttcacctgctatagccgacgtacatgttcgttttttttgggcggcgcttactttcttccccgttcgttctcagcatcgcaactcaatttgttatggcggagaagcccttgtatcccaggtagtaatgcacagatatgcattattattattcataaaatcgagctagttaccctatgaggtgacatgaagcgctcacggttactatgacggttagcttcacgactgttggtggcagtagcgtacgacttagctatagttccggacttacctaactgactagagtcacacttagctgaccctagtcacttaggcgcgccaagcttggatctcctgcaggatctggccggccggatgggcggatctcgtacctcaactttgtatagaaaagttgggccagaatggcccggaccgggttaccaagcggccgctggcaacttcaatgaattctgaatttaaaacatttttttttatatatatagatgatttggcgattttcgaactggaatggtgaaaaagtggttgagtacactattagtttatttatttaaaaaatagagggaaattcaaatgaaaaaaaaagtttcatctacagaaaaaaaaacacgtcaaaattccaaaaaacttgaacgtcttgaacaacggtataaccgtataagaaagggaacttaaaacttaaacgtctacatgattgaaagggtaaaaatattcatattacaatggtataagaaaatggagaagccagaggagcaactccaaagaagaagatgcagcaagagagtgtacattattataattataagttggtatatatgtagttgctaaaaaaaaaaaagagtgtacaatattttctgaagaagcatcgagctggttaatatttaagacccaccaaaacctaccaacaatgttattctcatctctaagcaaaagtttgatctcatctttttttttaattttttttttgatgggtcctcttctacctctgcatctccacgtgctatacaagtggcctcgctgtatgtattatttaccactctcttattgttactaaaaacttgaatgtcacttgaatgtcacttgaatgcaaactatatatttaggtgaataccagatcaaatagcaataaataaaccaacaatttatgctaattaaaaacttgaaaaaacactttccattacctatgattttttaatccaatcttggggtttgatgcccataaaacgaagtcgaaaagagaaaagcgaccttaattgtaataaatgcagctattgacttctctatcaacttcaagtcttcaagtaactacaaatttaataatctccttagcttatcttagagaagcacaaaacaaaagggtctacgcttagtcttcctagattcttgatttgagtcttgatggccacttgctttttatgtctcaatcctaagagttgatacttacttagtattaatcaggtttcacattatctcagacctagcttgcatttttgatacaaacatgtcatgcaatacacataagcaacacgtaccgagtcattgattgaaaaacatgacctaaatagtaatacggactgagagagagtgatgaatcatttcatatgggagacagctttctcatacgcgtccatgcctttgcatgaaagattaaataattcaactctttcacttatcttattttaatttactttgcagaattccaagttttattgcaatcaccaggggtattaaatgggatagtgtaaatgcacctgcaacacatcaactaaccacacactcctccacctgtttgtatttacttcaaaaacttaattcaaaaatccctttgcttctttccttccctctatttataaaccctagtatccggtttttattctaccacacaataccatttgcaacaaacttctctctgaatctcagtgaattctcataaaccatggaaactcaacaacaacaagcagatattcaagattttgggaacaaaaacagtaacacctatgcatgcaggcaaagcagtactaggtggacacccacaagtgatcagatcagaatactgaaagagctctactacaacaatggaatcagatcaccaactgctgatcagattcagagaatcgctgctcaactcagacagtacggcaagattgaaggcaagaacgtgttttattggtttcagaaccataaagctcgtgaacgccagaagaaacggttcactcctactgctcctccaccaccgtctcacttctccgatcatattaaccaccatcttcccaacgctgcccccatgcagattccgtctcaccaccaccactaccaccatcaagaaccaccacatgtctatgctcaccctcacaaactctacaccactcatcacattggggttggttcttcttcacaaggagtgatgggtgtagggtgtggctatggatctgttgctatggagaagagtttcaggaagtgttcaatatcaccaccgggagagagtaaggccacaggaggaattggccggaatatcggttcaagatcacggataagtgtcgattcgtgttccttcttcgacacaattaagccaaagacatatgagatgtttgagaatcatgatcaagatgaagaacaaggagagccttcaactgagatcgaaacacttccattattcccgattcacgacggcaaccatcatgatttcttcggcatgaggacggcaaatctgcaattggagcaaggcactggaggttactacactggaggaagctggtatcggtctgatgagagggcgtctcttgagctcagtctcaactcatatggttattataactaattcgaactggccaggtacctgacatcttatagtctgcaacctctcgtgtctgaattcctatctttatcaagtgttattgcttccacgactataggacagctttcgtcgaaaggttttgctcatgtgatctcgaaggattcatctagtctgatttttcgtgacttgtatcggttttattggattcatccaacatatatcaataaaaaatgagttgtgtttcctttcttcctagttcagttaaaattatttccctcctgcgcttgtgctgtaattgtctgtgtacctgttgtttgtgactgtgttagttcccttggatatgatttcgtatttgatatgtacatggagatagcttagcttcattattggagtatgaagttagtatgacatagtcactctcctggaaaattgacactgcaaaccatatttttattctgaaccacaaatcctagtcagtccgctggcatatgccgtccgtttgctgaatccagaacgtgggtttggagatgtacggctgagatgcctctatgcgaaggggatttcgtggtgaaacgagatgggagtagagcaacgcccgtggaagatgcttcaaacttccacacttttgagcaacgatcggcagtagtaaggtagacgatttcaagatcaaagcatatgaagataaacaacatcaacaacaaaatttgttggggttctatagagagaaacagagctacatacatacactgttttgtatctaccatctgagatgatgaaaagatgaaaaactaaagaatgccccggcgccaacgccaggacacgccgcgcgcgcgtcacccgagccatctcttgacccagccggcgctgtatatttacacacgttgcagcatcgatcaccacctgttcgatcgcgtcgccgtcaccaagcttggcgcgccggtcacccggtccgggcctagaaggccacccggggctcggcgttaggcttttagtccgctaggtggctagaccgaggttaggacgctagttcactaggggcctagtggtgttttaaggatgggcaagtttgtacaaaaaagcaggctggcgccggaaccaattcagtcgagtgcggccgccagtgtgatggatatctcgacccgggtgattgcggttacatcatgtacggaaaaataattctaatccttgatttaaatttgaacttgactatttatttattctttatttcattttgtaaatcattttatgtatctcctggcaagcaattttatccaccttgcaccaacaccttcgggttccataatcaaaccaccttaacttcacaccatgctgtaactcacaccgcccagcatctccaatgtgaaagaagctaaaatttaataaacaatcatacgaagcagtgacaaaataccagatggtattaatgcttcgataaaattaattggaaagtataaaatggtagaaaataataaattataattaatttaagtaagataaaaaataattaaaaactaaaatgttaaaattttaaaaaaattattttaaataatatttaaaaacattaaaaatcattttaaaaaatttatttatagaacaattaaataaatatttcagctaataaaaaacaaaagcttacctagccttagaagacaacttgtccaacaattagatgatacccattgcccttacgttttctttaacatcaattattgtttttgtcaacaagctatcttttagttttattttattggtaaaaaatatgtcgccttcaagttgcatcatttaacacatctcgtcattagaaaaataaaactcttccctaaacgattagtagaaaaaatcattcgataataaataagaaagaaaaattagaaaaaaataacttcattttaaaaaaatcattaaggctatattttttaaatgactaattttatatagactgtaactaaaagtatacaatttattatgctatgtatcttaaagaattacttataaaaatctacggaagaatatcttacaaagtgaaaaacaaatgagaaagaatttagtgggatgattatgattttatttgaaaattgaaaaaataattattaaagactttagtggagtaagaaagctttcctattagtcttttcttatccataaaaaaaaaaaaaaaaatctagcgtgacagcttttccatagattttaataatgtaaaatactggtagcagccgaccgttcaggtaatggacactgtggtcctaacttgcaacgggtgcgggcccaatttaataacgccgtggtaacggataaagccaagcgtgaagcggtgaaggtacatctctgactccgtcaagattacgaaaccgtcaactacgaaggactccccgaaatatcatctgtgtcataaacaccaagtcacaccatacatgggcacgcgtcacaatatgattggagaacggttccaccgcatatgctataaaatgcccccacacccctcgaccctaatcgcacttcaattgcaatcaaattagttcattctctttgcgcagttccctacctctcctttcaaggttcgtagatttcttccgtttttttttcttcttctttattgtttgttctacatcagcatgatgttgatttgattgtgttttctatcgtttcatcgattataaattttcataatcagaagattcagcttttattaatgcaagaacgtccttaattgatgattttataaccgtaaattaggtctaattagagtttttttcataaagattttcagatccgtttacaacaagccttaattgttgattctgtagtcgtagattaaggtttttttcatgaactacttcagatccgttaaacaacagccttatttgttgatacttcagtcgtttttcaagaaattgttcagatccgttgataaaagccttattcgttgattctgtatggtatttcaagagatattgctcaggtcctttagcaactaccttatttgttgattctgtggccatagattaggattttttttcacgaaattgcttcttgaaattacgtgatggattttgattctgatttatcttgtgattgttgactctacagccatggcccacagcaagcacggcctgaaggaggagatgaccatgaagtaccacatggagggctgcgtgaacggccacaagttcgtgatcaccggcgagggcatcggctaccccttcaagggcaagcagaccatcaacctgtgcgtgatcgagggcggccccctgcccttcagcgaggacatcctgagcgccggcttcaagtacggcgaccggatcttcaccgagtacccccaggacatcgtggactacttcaagaacagctgccccgccggctacacctggggccggagcttcctgttcgaggacggcgccgtgtgcatctgtaacgtggacatcaccgtgagcgtgaaggagaactgcatctaccacaagagcatcttcaacggcgtgaacttccccgccgacggccccgtgatgaagaagatgaccaccaactgggaggccagctgcgagaagatcatgcccgtgcctaagcagggcatcctgaagggcgacgtgagcatgtacctgctgctgaaggacggcggccggtaccggtgccagttcgacaccgtgtacaaggccaagagcgtgcccagcaagatgcccgagtggcacttcatccagcacaagctgctgcgggaggaccggagcgacgccaagaaccagaagtggcagctgaccgagcacgccatcgccttccccagcgccctggcctgagagctcgaatttccccgatcgttcaaacatttggcaataaagtttcttaagattgaatcctgttgccggtcttgcgatgattatcatataatttctgttgaattacgttaagcatgtaataattaacatgtaatgcatgacgttatttatgagatgggtttttatgattagagtcccgcaattatacatttaatacgcgatagaaaacaaaatatagcgcgcaaactaggataaattatcgcgcgcggtgtcatctatgttactagatcgggaattctagtggccggcccagctgatatctagacccagctttcttgtacaaagtggccgttaacggatcggccagaatggcccggaccgggttaccgaattcgagctcggtaccctgggatccgatatcgatgggccctggccgaagcttggtcacccggtccgggcctagaaggccagcttcggccgccccgggcaactttattatacaaagttgatggtacggatccgtcgacggcgcgccgcggacctgaattccagcacactggcggccgttagtctaaaaacggcccctaactaacgcttagttgcccgctagattagtcccccgttagtgcctagttagacacacgacgaactaggggctactagtaacggccgccagtgtgctcggtacggccagaatggccatctggattcagcagggggtgattgcggttacatcatgtacggaaaaataattctaatccttgatttaaatttgaacttgactatttatttattctttatttcattttgtaaatcattttatgtatctcctggcaagcaattttatccaccttgcaccaacaccttcgggttccataatcaaaccaccttaacttcacaccatgctgtaactcacaccgcccagcatctccaatgtgaaagaagctaaaatttaataaacaatcatacgaagcagtgacaaaataccagatggtattaatgcttcgataaaattaattggaaagtataaaatggtagaaaataataaattataattaatttaagtaagataaaaaataattaaaaactaaaatgttaaaattttaaaaaaattattttaaataatatttaaaaacattaaaaatcattttaaaaaatttatttatagaacaattaaataaatatttcagctaataaaaaacaaaagcttacctagccttagaagacaacttgtccaacaattagatgatacccattgcccttacgttttctttaacatcaattattgtttttgtcaacaagctatcttttagttttattttattggtaaaaaatatgtcgccttcaagttgcatcatttaacacatctcgtcattagaaaaataaaactcttccctaaacgattagtagaaaaaatcattcgataataaataagaaagaaaaattagaaaaaaataacttcattttaaaaaaatcattaaggctatattttttaaatgactaattttatatagactgtaactaaaagtatacaatttattatgctatgtatcttaaagaattacttataaaaatctacggaagaatatcttacaaagtgaaaaacaaatgagaaagaatttagtgggatgattatgattttatttgaaaattgaaaaaataattattaaagactttagtggagtaagaaagctttcctattagtcttttcttatccataaaaaaaaaaaaaaaaatctagcgtgacagcttttccatagattttaataatgtaaaatactggtagcagccgaccgttcaggtaatggacactgtggtcctaacttgcaacgggtgcgggcccaatttaataacgccgtggtaacggataaagccaagcgtgaagcggtgaaggtacatctctgactccgtcaagattacgaaaccgtcaactacgaaggactccccgaaatatcatctgtgtcataaacaccaagtcacaccatacatgggcacgcgtcacaatatgattggagaacggttccaccgcatatgctataaaatgcccccacacccctcgaccctaatcgcacttcaattgcaatcaaattagttcattctctttgcgcagttccctacctctcctttcaaggttcgtagatttcttccgtttttttttcttcttctttattgtttgttctacatcagcatgatgttgatttgattgtgttttctatcgtttcatcgattataaattttcataatcagaagattcagcttttattaatgcaagaacgtccttaattgatgattttataaccgtaaattaggtctaattagagtttttttcataaagattttcagatccgtttacaacaagccttaattgttgattctgtagtcgtagattaaggtttttttcatgaactacttcagatccgttaaacaacagccttatttgttgatacttcagtcgtttttcaagaaattgttcagatccgttgataaaagccttattcgttgattctgtatggtatttcaagagatattgctcaggtcctttagcaactaccttatttgttgattctgtggccatagattaggattttttttcacgaaattgcttcttgaaattacgtgatggattttgattctgatttatcttgtgattgttgactctacagccatggctgcaactactcttacatctgctttacctggtgctttcagttcatcccagagaccaagtgctcctttcaacttacaaagatcacctagagtgcttagaaggttcaacagaaagacaggacgtcaacctcgtggacttgttcgtgctgcaaaggctcaagcggcgcaaaacctgccagagaaattcgatgaaacaagactctgggaggccctcaggggatttggggttagtccaagtagggttacttacgctcccgtcggattcggagattaccactggaccgtcacagatgaagacgggagaccttggttcgcaactgtcagtgacctcgaacacaaagagcattgcgggcagggagcacaagcagcccttaaaggactcagacaagctatggacactgccctcgcacttagagatagggacggactcagattcgtggttgctccagtggcagcaacagatgggggtggccctgtccttccccttgacgctaggtatgcactcacagtcttccctcacgtcccaggaagaacaggagagttcggacaaagactcacagaggcagagagggacagactgcttgctcttctggcagaactccacggaagaacacctcctgaaacaaccccaccagccgatatggaaccaccaggacttcctggtgttagagcagcactcgccgaaagtgaaggaccttggagtggaggaccatttgcagaacccgctagacttcttctcagagaacacgaggccacactgcacgcaagactcgctgaattcgaagccctcgtcgcaagagttaagggtcgtggagcacctcttgtcgttacccacggagaaccacacccaggcaacttgatcctcggagaggaaggctatctcctcgtggactgggatacagttggactggctccagctgaaagggatttgagtctcatctcagacgacccagctgacctcgcaagatacgcagagcttacaggaagaactccagacccagacgcactcgcactctatagactgcgttggagtctccttgatgtggctgagttcgtcgagtggttcagggctgaacaccaaagaacccaagacaccgagagtgcatggaaggggttcactgacacacttgggcaattggctgctggtggatcagctgcatagcaaacttatctctgttatgaatcagaagaagttcatgtctcgtttcatttaaaactttggtggtttgtgttttggggccttgtaaagcccctgatgaataattgttcaactatgtttccgttcctgtgttatacctttctttctaatgagtaatgacatcaaacttcttctgtattgaaattatgtccttgtgagtctctttatcatcgtttcgtctttacattatatgtgctacttttgtctaatgagcctgaaaagtggctccaatggtacgcactggaagatttgttggcttctggtagatatagcgacagtgttgagcttgtaatatcatgtctcttattgctaaattagttcctttcttaacagaaaccttcaaagtttttgtttttgttttcatttacctaatgtacacatacgctggccatgactaacaacatgtccaggcttagagcatatttttttctagcttaaattgttaacttgtcattcagtaaaatccgagaattgtgaagctctaattgaagctaattcgttttataaagtcagttaaaaagtatactaaattatccaacttttcttcaaaatctcaaaattctatgacaaaacgatagtctttgtttatgtcagtaccacaaagaggtggaaaaaaacaccaaaaaaacaataagcaaactatacactgagaagaaaaataaaagagagctcaatagatgttttatactaacggtagattagatcaaagatccaagctttactctacatagagcagaacccagaatcccttcatatctcttttattctagcaccgataatctactgaaaagaagacacttagagctctgtctctttgtcaaagaagtcccagccgtcatccagaagctccttacgttcattaacagaggccgcaattggatcgggtttacttattttgtgggtatctatacttttattagatttttaatcaggctcctgatttctttttatttcgattgaattcctgaacttgtattattcagtagatcgaataaattataaaaagataaaatcataaaataatattttatcctatcaatcatattaaagcaatgaatatgtaaaattaatcttatctttattttaaaaaatcatataggtttagtatttttttaaaaataaagataggattagttttactattcactgcttattacttttaaaaaaatcataaaggtttagtatttttttaaaataaatataggaatagttttactattcactgctttaatagaaaaatagtttaaaatttaagatagttttaatcccagcatttgccacgtttgaacgtgagccgaaacgatgtcgttacattatcttaacctagctgaaacgatgtcgtcataatatcgccaaatgccaactggactacgtcgaacccacaaatcccacaaagcgcgtgaaatcaaatcgctcaaaccacaaaaaagaacaacgcgtttgttacacgctcaatcccacgcgagtagagcacagtaaccttcaaataagcgaatggggcataatcagaaatccgaaataaacctaggggcattatcggaaatgaaaagtagctcactcaatataaaaatctaggaaccctagttttcgttatcactctgtgctccctcgctctatttctcagtctctgtgtttgcggctgaggattccgaacgagtgaccttcttcgtttctcgcaaaggtaacagcctctgctcttgtctcttcgattcgatctatgcctgtctcttatttacgatgatgtttcttcggttatgtttttttatttatgctttatgctgttgatgttcggttgtttgtttcgctttgtttttgtggttcagttttttaggattcttttggtttttgaatcgattaatcggaagagattttcgagttatttggtgtgttggaggtgaatcttttttttgaggtcatagatctgttgtatttgtgttataaacatgcgactttgtatgattttttacgaggttatgatgttctggttgttttattatgaatctgttgagacagaaccatgatttttgttgatgttcgtttacactattaaaggtttgttttaacaggattaaaagttttttaagcatgttgaaggagtcttgtagatatgtaaccgtcgatagtttttttgtgggtttgttcacatgttatcaagcttaatcttttactatgtatgcgaccatatctggatccagcaaaggcgattttttaattccttgtgaaacttttgtaatatgaagttgaaattttgttattggtaaactataaatgtgtgaagttggagtatacctttaccttcttatttggctttgtgatagtttaatttatatgtattttgagttctgacttgtatttctttgaattgattctagtttaagtaatcatggcctcctccgagaacgtcatcaccgagttcatgcgcttcaaggtgcgcatggagggcaccgtgaacggccacgagttcgagatcgagggcgagggcgagggccgcccctacgagggccacaacaccgtgaagctgaaggtgacgaagggcggccccctgcccttcgcctgggacatcctgtccccccagttccagtacggctccaaggtgtacgtgaagcaccccgccgacatccccgactacaagaagctgtccttccccgagggcttcaagtgggagcgcgtgatgaacttcgaggacggcggcgtggcgaccgtgacccaggactcctccctgcaggacggctgcttcatctacaaggtgaagttcatcggcgtgaacttcccctccgacggccccgtgatgcagaagaagaccatgggctgggaggcctccaccgagcgcctgtacccccgcgacggcgtgctgaagggcgagacccacaaggccctgaagctgaaggacggcggccactacctggtggagttcaagtccatctacatggccaagaagcccgtgcagctgcccggctactactacgtggacgccaagctggacatcacctcccacaacgaggactacaccatcgtggagcagtacgagcgcaccgagggccgccaccacctgttcctgtagttttgtgatctgatgataagtggttggttcgtgtctcatgcacttgggaggtgatctatttcacctggtgtagtttgtgtttccgtcagttggaaaaacttatccctatcgatttcgttttcattttctgcttttcttttatgtaccttcgtttgggcttgtaacgggcctttgtatttcaactctcaataataatccaagtgcatgttaaacaatttgtcatctgtttcggctttgatatactactggtgaagatgggccgtactactgcatcacaacgaaaaataataataagatgaaaaacttgaagtggaaaaaaaaaaaaacttgaatgttcactactactcattgaccataatgtttaacatacatagctcaatagtatttttgtgaatatggcaacacaaacagtccaaaacaattgtctcttactataccaaaccaagggcgccgcttgtttgccactctttgtgtgcaatagtgtgattaccacatctccacattcaatatattccctgaattatctgacgattttgatggctcactgttttcccaagtcttgaattgtcttctgtgcgccagtcaaatgcatatgtgttgagtttatcttttaaatatcaagcttttgtttttaacttttgtttgtaaccaaaaactcacagtaggagtttgatcacataattttatgtttgcctttgcaatttctagtgagtctttgattaaaagcttgaaaagaaaatgcagccaagcttaccaagtaagttatgtgtattaaccagaggaagagagaatcttgcaaaatttcaacaaacacaaaaagaagtattactacgattggtggagaaagaaaacgattccaaatcttgaactgttgttgtaaaagcatagcagaaagtgggagacaaccgaaatagaaatgactataacttaatttaatgttatcattataatttcttctagcaaatatttagaaagtaaatatcacatcaacctttaatgtaattaagctttctctttttgattcatgtgagatgaaaagaaaaaaaagaagagaaaagtgtagaaaacacatcatttctaagctgaagctgaggtacaaattaattaataagtgactagggtcacgtgaccctagtcacttatgattccgatgacttcgtaggttcctagctcaagccgctcgtgtccaagcgtcacttacgattagctaatgattacggcatctaggaccgactagttcttatgtgcttctagtctccaaatgtggttgatagttattttgctctaagatcaacagtaatgaagtataaatcatcgttgtggtgtgctactcggttaattgagcattaacacacacaaacatgacgaggatggtataatctccaaaaatgtgtactttgttaggtgggaccctatagccttgattaatgtgctatgttaggcatgcctggaaacgtgtgacgcatatgttttgtgaacctgttgatattatatgtgcttttatattaccatattttattaaaatactaatatttattactagtaagatataacattctatctagcttaaaaactaaccataaatattccataataactagatttaccaaactaatatactaaatatacataataaatacaaaattaacaagacaataatcaatatttatgagcttaatatatttagacattatggttggtcgacgataatcatgctaacttttcgtaattgcttgattgaaatatgcttagaataatgcctctttgttctacatggcaaatagggaccattatggtgtaacaccctgggaaccacaaacaccccgaaatgctactaaactacacaactaaccttcatatataaaatttcgacagcatctcctttgaaaatttgcatagacgtggaagcaacagagtataaacagatctagctagctaagtttaaacggccggccaaacgtgcaagcgctactagacaattcagtacattaaaaacgtccgcaatgtgttattaagttgtctaagcgtcaatttatttacaattgaatatatcctgcca

SEQ ID NO: 176 - DNA, 286 bp, Artificial Sequence
  PCR Target1
ccggaatcggacctcgggacgtcgccaaagttagctaggtgtccttagcgtttcttaggttctaggcgttaggggtcaataggttagcctagaagtcccgcactaacagcctagcttaacagttccaagctaagccactagactagccctatccgactaacctagtctaagccgaacggggatctaatctaagctaggcacccattagactagttcactagcgcgaccgcactaaactaggctaaaggttaatagcaactagttagctaggggacgttagctgccc

SEQ ID NO: 177 - DNA, 286 bp, Artificial Sequence
  PCR Target2
gacgtcccgaggtccgattccgggctaattaacacctagctcgccactcgactaattagggactaagcctagcgcttagccgttaaaacctagcacaccctaagcacccttagttaggttcccctcttaattaagccctagtgagcccctaagttaaggggacgctaagagccccctaacctagtattcggctagaggcgaactaggctaaacacctaagcgcacctctttaagctagatcgctagggggctaggctagagcttcgctagattagtctaagggcag

SEQ ID NO: 178 - DNA, 100 bp, Artificial Sequence
  PCR Target3
gcgactaattaactagctgtcccacggcctaactagcacttaatcccctagcctaacctaagagcgctaatctaggctagtggtcacttagggctttaag

SEQ ID NO: 179 - DNA, 64 bp, Artificial Sequence
  PCR Target4
tcgggacgtcgctagtcactgattagagacggtctgcactaactaacggctagtctcctccgac

SEQ ID NO: 180 - DNA, 59 bp, Artificial Sequence
  PCR Target5
attccggcctagtgcttagctaacgggaaacccgcttaacgattagttagtggacgggg

SEQ ID NO: 181 - DNA, 75 bp, Artificial Sequence
  PCR Target6
ccagtttagttaggccgacttattgaactagtctagggcgttaggaactctctaaggggttagcgtgttagaggc

SEQ ID NO: 182 - DNA, 73 bp, Artificial Sequence
  PCR Target7
gctagtagacgctgctagtgactaaggtttaggtatcagccctagctaaccgttagtcttcgctcctaagtgc

SEQ ID NO: 183 - DNA, 84 bp, Artificial Sequence
  PCR Target8
ttaacggcaaacgctaattagtcactaggcccaggaaacactaactaagccctagcttatcctagcgcaacctagttaggtctt

SEQ ID NO: 184 - DNA, 90 bp, Artificial Sequence
  PCR Target9
gtctaaaaacggcccctaactaacgcttagttgcccgctagattagtcccccgttagtgcctagttagacacacgacgaactaggggcta

SEQ ID NO: 185 - DNA, 81 bp, Artificial Sequence
  PCR Target10
gcgacttattgaactagtctagggcgcggctaacaacctagcttagattgccttgtctaaacccttaggctaacgcgccac

SEQ ID NO: 186 - DNA, 90 bp, Artificial Sequence
  PCR Target11
agattagtgggccaagcgtttaatcagggttaagagtggctactaacggctaggtcgctagctatttcctcgtgagaccttcttgtaact

SEQ ID NO: 187 - DNA, 83 bp, Artificial Sequence
  PCR Target12
gctcggcgttaggcttttagtccgctaggtggctagaccgaggttaggacgctagttcactaggggcctagtggtgttttaag

SEQ ID NO: 188 - DNA, 75 bp, Artificial Sequence
  PCR Target13
attaagacccgtcgtcaagtaggaattccagaaatcaacgcacggtaactaaatcctcgcgctaagctgggtcag

SEQ ID NO: 189 - DNA, 1204 bp, Arabidopsis thaliana; identical to SEQ ID NO: 45

SEQ ID NO: 190 - DNA, 16372 bp, Artificial Sequence
  RV029482 T-DNA
aattacaacggtatatatcctgtcagccaacaccaaaacatcaaaaaaatcgggatcaggatcaggatctgcggccgcatcctgcaggtttaaacggccggccttcactagctagctgctaagctcaaacgagcaggaagcaacgagagggtggcgcgcgaccgacgtgcgtacgtagcatgagcctgagtggagacgttggacgtgtatgtatatacctctctgcgtgttaactatgtacgtaagcggcaggcagtgcaataagtgtggctctgtagtatgtacgtgcgggtacgatgctgtaagctactgaggcaagtccataaataaataatgacacgtgcgtgttctataatctcttcgcttcttcatttgtccccttgcggagtttggcatccattgatgccgttacgctgagaacagacacagcagacgaaccaaaagtgagttcttgtatgaaactatgacccttcatcgctaggctcaaacagcaccccgtacgaacacagcaaattagtcatctaactattagcccctacatgtttcagacgatacataaatatagcccatccttagcaattagctattggccctgcccatcccaagcaatgatctcgaagtatttttaatatatagtatttttaatatgtagcttttaaaattagaagataattttgagacaaaaatctccaagtatttttttgggtattttttactgcctccgtttttctttatttctcgtcacctagtttaattttgtgctaatcggctataaacgaaacagagagaaaagttactctaaaagcaactccaacagattagatataaatcttatatcctgcctagagctgttaaaaagatagacaactttagtggattagtgtatgcaacaaactctccaaatttaagtatcccaactacccaacgcatatcgttcccttttcattggcgcacgaactttcacctgctatagccgacgtacatgttcgttttttttgggcggcgcttactttcttccccgttcgttctcagcatcgcaactcaatttgttatggcggagaagcccttgtatcccaggtagtaatgcacagatatgcattattattattcataaaatcgagctagttaccctatgaggtgacatgaagcgctcacggttactatgacggttagcttcacgactgttggtggcagtagcgtacgacttagctatagttccggacttacctaactgactagagtcacacttagctgaccctagtcacttaataacttcgtatagcatacattatacgaagttatggcgcgccaagcttggatctcctgcaggatctggccggccggatgggcggatctcgtacctcaactttgtatagaaaagttgggccagaatggcccggaccgggttaccaagcggccgcggaattcatcaggatattcttgtttaagatgttgaactctatggaggtttgtatgaactgatgatctaggaccggataagttcccttcttcatagcgaacttattcaaagaatgttttgtgtatcattcttgttacattgttattaatgaaaaaatattattggtcattggactgaacacgagtgttaaatatggaccaggccccaaataagatccattgatatatgaattaaataacaagaataaatcgagtcaccaaaccacttgccttttttaacgagacttgttcaccaacttgatacaaaagtcattatcctatgcaaatcaataatcatacaaaaatatccaataacactaaaaaattaaaagaaatggataatttcacaatatgttatacgataaagaagttacttttccaagaaattcactgattttataagcccacttgcattagataaatggcaaaaaaaaacaaaaaggaaaagaaataaagcacgaagaattctagaaaatacgaaatacgcttcaatgcagtgggacccacggttcaattattgccaattttcagctccaccgtatatttaaaaaataaaacgataatgctaaaaaaatataaatcgtaacgatcgttaaatctcaacggctggatcttatgacgaccgttagaaattgtggttgtcgacgagtcagtaataaacggcgtcaaagtggttgcagccggcacacacgagtcgtgtttatcaactcaaagcacaaatacttttcctcaacctaaaaataaggcaattagccaaaaacaactttgcgtgtaaacaacgctcaatacacgtgtcattttattattagctattgcttcaccgccttagctttctcgtgacctagtcgtcctcgtcttttcttcttcttcttctataaaacaatacccaaagagctcttcttcttcacaattcagatttcaatttctcaaaatcttaaaaactttctctcaattctctctaccgtgatcaaggtaaatttctgtgttccttattctctcaaaatcttcgattttgttttcgttcgatcccaatttcgtatatgttctttggtttagattctgttaatcttagatcgaagacgattttctgggtttgatcgttagatatcatcttaattctcgattagggtttcatagatatcatccgatttgttcaaataatttgagttttgtcgaataattactcttcgatttgtgatttctatctagatctggtgttagtttctagtttgtgcgatcgaatttgtcgattaatctgagtttttctgattaacagcggccgggatccccatggctcctaaaaagaagaggaaagttatggaagaaaacagcaacagcagcagaagcagcaacagcggcgcacgttggaatccgacgccggagcagctgagcattctgaaagagctgtatcatggccgcggaatcaggtcgcccagcgccgaacagatccaccatatctcatggaaactcagctcctacggcaaaatcgagggcaagaacgtcttctactggttccagaaccataaggcccgccagcgtcaaaaagagcgtctcggttccgtcatgcctgcttctgcttcttcttcttcttttgcatctccttctcagggagctgtcggcattcgaaggggaagtacggtgctatgtcttaaggaaacttcagcttcatcttcatcttattcttctgttccgcgttcggtatcagctgtgcgccagtgtgctgcatctcgtgactgtggcttgcaccatgatctgacaactctggagctgtttcccctgcaccgtgaaagtagaatagacgctggggaggaagacgaggagcaacaggaggtggtggtgctagataataataataacacctggacaaggcaccaaaatgtaaatgtgaatcatgcaaataatgacgatgagccacagcatggtcatgggcagattgatattgatgtagggcttcgtctttgcctcggtggatttcgctgaggtacctgacatcttatagtctgcaacctctcgtgtctgaattcctatctttatcaagtgttattgcttccacgactataggacagctttcgtcgaaaggttttgctcatgtgatctcgaaggattcatctagtctgatttttcgtgacttgtatcggttttattggattcatccaacatatatcaataaaaaatgagttgtgtttcctttcttcctagttcagttaaaattatttccctcctgcgcttgtgctgtaattgtctgtgtacctgttgtttgtgactgtgttagttcccttggatatgatttcgtatttgatatgtacatggagatagcttagcttcattattggagtatgaagttagtatgacatagtcactctcctggaaaattgacactgcaaaccatatttttattctgaaccacaaatcctagtcagtccgctggcatatgccgtccgtttgctgaatccagaacgtgggtttggagatgtacggctgagatgcctctatgcgaaggggatttcgtggtgaaacgagatgggagtagagcaacgcccgtggaagatgcttcaaacttccacacttttgagcaacgatcggcagtagtaaggtagacgatttcaagatcaaagcatatgaagataaacaacatcaacaacaaaatttgttggggttctatagagagaaacagagctacatacatacactgttttgtatctaccatctgagatgatgaaaagatgaaaaactaaagaatgccccggcgccaacgccaggacacgccgcgcgcgcgtcacccgagccatctcttgacccagccggcgctgtatatttacacacgttgcagcatcgatcaccacctgttcgatcgcgtcgccgtcaccaagcttggcgcgccggtcacccggtccgggcctagaaggccacccggggctcggcgttaggcttttagtccgctaggtggctagaccgaggttaggacgctagttcactaggggcctagtggtgttttaaggatgggcaagtttgtacaaaaaagcaggctccggccagaatggcccggaccgggttaccgaattcgagctcggtaccctgggatccgatatcttattagtgtttgtgcaaattcgactctacttgagttaggtagacagattcatggattgagtattaagtctagctttgattcttctagctttgtgggaagttctttagtctcgttgtattcaaagtgtggtgttcctgaaggagcttatcaagtttttaacgaggtgcctgtgaagaatctcgggatttggaacgctatgctcaaggcgtatgcgcaacattcacatactcaaaaggttattgaattgttcaaaaggatgaagctttctggaatgaaaccaaatttcataacttttttgaatgtgctcaatgcttgtagtcacgcgggtctagttgatgaagggagatactactttgatcagatgaaagaatcgaggattgagccgacggataagcattacgcttccttggtggatatgttaggacgagctggtagattacaagaagcacttgaagttatcactaatatgccgattgatcccacggaatctgtatggggagctttattaacgagttgtacagtccacaagaacacagagcttgcagcatttgcagcagacaaggtcttcgaattaggaccagtgagttccggtatgcacatttcgttatccaatgcttatgcagccgatggtagattcgaagacgcagctaaagctagaaaattgcttcgagaccgaggggaaaagaaggaaacagggctaagttgggttgaagaaaggaacaaggttcatacatttgcagctggagaaagacgtcatgagaaaagcaaggagatatatgagaagctggctgagttaggggaagagatggagaaagcgggttacattgcagacacaagctatgttctgagagaagtggatggtgacgagaagaatcaaaccataaggtatcatagtgagagattagctattgcttttggactgatcacgtttccagctgatagaccgatccgagtaatgaagaatctgcgtgtttgcggtgattgccataacgcgatcaagttcatgtccgtatgtacgagacgagtgatcattgtgagagataataatcggtttcatcggtttgaagatggcaagtgttcttgtaatgactattggtgaagaagacaaatgagagttggtttatatttaaccataatttcattcagttcacactgaaccggcgaaatttctttgccagacctattcggaattgaaacaagtggagtctcgaaacgaaaagaactttctggaattcgtttgctcacaaagctaaaaacggttgatttcatcgaaatacggcgtcgttttcaaagaacaatccagaaatcactggttttcctttatttcaaaagaagagactagaactttatttctcctctataaaatcactttgttttttcctctcttcttcataaatcaacaaaacaatcacaaatctctcgaaacgctctcgaagttccaaattttctcttagcattctctttcgtttctcgtttgcgttgaatcaaagttcgttgcgggatccaccatgtccaacctgctcacggttcaccagaaccttccggctcttccagtggacgcgacgtccgatgaagtcaggaagaacctcatggacatgttccgcgacaggcaagcgttcagcgagcacacctggaagatgctgctctccgtctgccgctcctgggctgcatggtgcaagctgaacaacaggaagtggttccccgctgagcccgaggacgtgagggattaccttctgtacctgcaagcgcgaggtttgtttctgcttctacctttgatatatatataataattatcattaattagtagtaatataatatttcaaatatttttttcaaaataaaagaatgtagtatatagcaattgcttttctgtagtttataagtgtgtatattttaatttataacttttctaatatatgaccaaaacatggtgatgcctaggtctggcagtgaagaccatccagcaacaccttggacaactgaacatgcttcacaggcgctccggcctcccgcgccccagcgactcgaacgccgtgagcctcgtcatgcgccgcatcaggaaggaaaacgtcgatgccggcgaaagggcaaagcaggccctcgcgttcgagaggaccgatttcgaccaggtccgcagcctgatggagaacagcgacaggtgccaggacattaggaacctggcgttcctcggaattgcatacaacacgctcctcaggatcgcggaaattgcccgcattcgcgtgaaggacattagccgcaccgacggcggcaggatgcttatccacattggcaggaccaagacgctcgtttccaccgcaggcgtcgaaaaggccctcagcctcggagtgaccaagctcgtcgaacgctggatctccgtgtccggcgtcgcggacgacccaaacaactacctcttctgccgcgtccgcaagaacggggtggctgcccctagcgccaccagccaactcagcacgagggccttggaaggtattttcgaggccacccaccgcctgatctacggcgcgaaggatgacagcggtcaacgctacctcgcatggtccgggcactccgcccgcgttggagctgctagggacatggcccgcgccggtgtttccatccccgaaatcatgcaggcgggtggatggacgaacgtgaacattgtcatgaactacattcgcaaccttgacagcgagacgggcgcaatggttcgcctcctggaagatggtgactgaggtaccgttaacagatctactaactatctatactgtaataatgttgtatagccgccggatagctagctagtttagtcattcagcggcgatgggtaataataaagtgtcatccatccatcaccatgcgtggcaacgtgagcaatgacctgattgaacaaattgaaatgaaaagaagaaatatgttatatgtcaacgagatttcctcataatgccactgacgacgtgtgtccaagaaatgtatcagtgatacgtatattcacaatttttttatgacttatactcacaatttgtttttttactacttatactcacaatttgttgtgcgtaccataacaatttcgatcgaatatatatcagaaagttgacgaaagtaagctcactcaaaaagttaaatgggctgcggaagctgcgtcaggcccaagttttggctattctatccggtatccacgattttgatggctgagggacatatgttcgcttaagcttcggtccgggcctagaaggccgatctcccgggcaactttattatacaaagttgatcacgtgagagtctaaaaacggcccctaactaacgcttagttgcccgctagattagtcccccgttagtgcctagttagacacacgacgaactaggggctataaggatttaaatatggtacggatccgtcgacggcgcgccgcggacctgaattccagcacactggcggccgttaataacttcgtatagcatacattatacgaagttatagtggcatcacgtttctagttctagacccatcagctgaggtacaaattacggccagaatggccatctggattcagcagggggtgattgcggttacatcatgtacggaaaaataattctaatccttgatttaaatttgaacttgactatttatttattctttatttcattttgtaaatcattttatgtatctcctggcaagcaattttatccaccttgcaccaacaccttcgggttccataatcaaaccaccttaacttcacaccatgctgtaactcacaccgcccagcatctccaatgtgaaagaagctaaaatttaataaacaatcatacgaagcagtgacaaaataccagatggtattaatgcttcgataaaattaattggaaagtataaaatggtagaaaataataaattataattaatttaagtaagataaaaaataattaaaaactaaaatgttaaaattttaaaaaaattattttaaataatatttaaaaacattaaaaatcattttaaaaaatttatttatagaacaattaaataaatatttcagctaataaaaaacaaaagcttacctagccttagaagacaacttgtccaacaattagatgatacccattgcccttacgttttctttaacatcaattattgtttttgtcaacaagctatcttttagttttattttattggtaaaaaatatgtcgccttcaagttgcatcatttaacacatctcgtcattagaaaaataaaactcttccctaaacgattagtagaaaaaatcattcgataataaataagaaagaaaaattagaaaaaaataacttcattttaaaaaaatcattaaggctatattttttaaatgactaattttatatagactgtaactaaaagtatacaatttattatgctatgtatcttaaagaattacttataaaaatctacggaagaatatcttacaaagtgaaaaacaaatgagaaagaatttagtgggatgattatgattttatttgaaaattgaaaaaataattattaaagactttagtggagtaagaaagctttcctattagtcttttcttatccataaaaaaaaaaaaaaaaatctagcgtgacagcttttccatagattttaataatgtaaaatactggtagcagccgaccgttcaggtaatggacactgtggtcctaacttgcaacgggtgcgggcccaatttaataacgccgtggtaacggataaagccaagcgtgaagcggtgaaggtacatctctgactccgtcaagattacgaaaccgtcaactacgaaggactccccgaaatatcatctgtgtcataaacaccaagtcacaccatacatgggcacgcgtcacaatatgattggagaacggttccaccgcatatgctataaaatgcccccacacccctcgaccctaatcgcacttcaattgcaatcaaattagttcattctctttgcgcagttccctacctctcctttcaaggttcgtagatttcttccgtttttttttcttcttctttattgtttgttctacatcagcatgatgttgatttgattgtgttttctatcgtttcatcgattataaattttcataatcagaagattcagcttttattaatgcaagaacgtccttaattgatgattttataaccgtaaattaggtctaattagagtttttttcataaagattttcagatccgtttacaacaagccttaattgttgattctgtagtcgtagattaaggtttttttcatgaactacttcagatccgttaaacaacagccttatttgttgatacttcagtcgtttttcaagaaattgttcagatccgttgataaaagccttattcgttgattctgtatggtatttcaagagatattgctcaggtcctttagcaactaccttatttgttgattctgtggccatagattaggattttttttcacgaaattgcttcttgaaattacgtgatggattttgattctgatttatcttgtgattgttgactctacagccatggctgcaactactcttacatctgctttacctggtgctttcagttcatcccagagaccaagtgctcctttcaacttacaaagatcacctagagtgcttagaaggttcaacagaaagacaggacgtcaacctcgtggacttgttcgtgctgcaaaggctcaagcggcgcaaaacctgccagagaaattcgatgaaacaagactctgggaggccctcaggggatttggggttagtccaagtagggttacttacgctcccgtcggattcggagattaccactggaccgtcacagatgaagacgggagaccttggttcgcaactgtcagtgacctcgaacacaaagagcattgcgggcagggagcacaagcagcccttaaaggactcagacaagctatggacactgccctcgcacttagagatagggacggactcagattcgtggttgctccagtggcagcaacagatgggggtggccctgtccttccccttgacgctaggtatgcactcacagtcttccctcacgtcccaggaagaacaggagagttcggacaaagactcacagaggcagagagggacagactgcttgctcttctggcagaactccacggaagaacacctcctgaaacaaccccaccagccgatatggaaccaccaggacttcctggtgttagagcagcactcgccgaaagtgaaggaccttggagtggaggaccatttgcagaacccgctagacttcttctcagagaacacgaggccacactgcacgcaagactcgctgaattcgaagccctcgtcgcaagagttaagggtcgtggagcacctcttgtcgttacccacggagaaccacacccaggcaacttgatcctcggagaggaaggctatctcctcgtggactgggatacagttggactggctccagctgaaagggatttgagtctcatctcagacgacccagctgacctcgcaagatacgcagagcttacaggaagaactccagacccagacgcactcgcactctatagactgcgttggagtctccttgatgtggctgagttcgtcgagtggttcagggctgaacaccaaagaacccaagacaccgagagtgcatggaaggggttcactgacacacttgggcaattggctgctggtggatcagctgcatagcaaacttatctctgttatgaatcagaagaagttcatgtctcgtttcatttaaaactttggtggtttgtgttttggggccttgtaaagcccctgatgaataattgttcaactatgtttccgttcctgtgttatacctttctttctaatgagtaatgacatcaaacttcttctgtattgaaattatgtccttgtgagtctctttatcatcgtttcgtctttacattatatgtgctacttttgtctaatgagcctgaaaagtggctccaatggtacgcactggaagatttgttggcttctggtagatatagcgacagtgttgagcttgtaatatcatgtctcttattgctaaattagttcctttcttaacagaaaccttcaaagtttttgtttttgttttcatttacctaatgtacacatacgctggccatgactaacaacatgtccaggcttagagcatatttttttctagcttaaattgttaacttgtcattcagtaaaatccgagaattgtgaagctctaattgaagctaattcgttttataaagtcagttaaaaagtatactaaattatccaacttttcttcaaaatctcaaaattctatgacaaaacgatagtctttgtttatgtcagtaccacaaagaggtggaaaaaaacaccaaaaaaacaataagcaaactatacactgagaagaaaaataaaagagagctcaatagatgttttatactaacggtagattagatcaaagatccaagctttactctacatagagcagaacccagaatcccttcatatctcttttattctagcaccgataatctactgaaaagaagacacttagagctctgtctctttgtcaaagaagtcccagccgtcatccagaagctccttacgttcattaacagaggccgcaattggatcgggtttacttattttgtgggtatctatacttttattagatttttaatcaggctcctgatttctttttatttcgattgaattcctgaacttgtattattcagtagatcgaataaattataaaaagataaaatcataaaataatattttatcctatcaatcatattaaagcaatgaatatgtaaaattaatcttatctttattttaaaaaatcatataggtttagtatttttttaaaaataaagataggattagttttactattcactgcttattacttttaaaaaaatcataaaggtttagtatttttttaaaataaatataggaatagttttactattcactgctttaatagaaaaatagtttaaaatttaagatagttttaatcccagcatttgccacgtttgaacgtgagccgaaacgatgtcgttacattatcttaacctagctgaaacgatgtcgtcataatatcgccaaatgccaactggactacgtcgaacccacaaatcccacaaagcgcgtgaaatcaaatcgctcaaaccacaaaaaagaacaacgcgtttgttacacgctcaatcccacgcgagtagagcacagtaaccttcaaataagcgaatggggcataatcagaaatccgaaataaacctaggggcattatcggaaatgaaaagtagctcactcaatataaaaatctaggaaccctagttttcgttatcactctgtgctccctcgctctatttctcagtctctgtgtttgcggctgaggattccgaacgagtgaccttcttcgtttctcgcaaaggtaacagcctctgctcttgtctcttcgattcgatctatgcctgtctcttatttacgatgatgtttcttcggttatgtttttttatttatgctttatgctgttgatgttcggttgtttgtttcgctttgtttttgtggttcagttttttaggattcttttggtttttgaatcgattaatcggaagagattttcgagttatttggtgtgttggaggtgaatcttttttttgaggtcatagatctgttgtatttgtgttataaacatgcgactttgtatgattttttacgaggttatgatgttctggttgttttattatgaatctgttgagacagaaccatgatttttgttgatgttcgtttacactattaaaggtttgttttaacaggattaaaagttttttaagcatgttgaaggagtcttgtagatatgtaaccgtcgatagtttttttgtgggtttgttcacatgttatcaagcttaatcttttactatgtatgcgaccatatctggatccagcaaaggcgattttttaattccttgtgaaacttttgtaatatgaagttgaaattttgttattggtaaactataaatgtgtgaagttggagtatacctttaccttcttatttggctttgtgatagtttaatttatatgtattttgagttctgacttgtatttctttgaattgattctagtttaagtaatcatggcctcctccgagaacgtcatcaccgagttcatgcgcttcaaggtgcgcatggagggcaccgtgaacggccacgagttcgagatcgagggcgagggcgagggccgcccctacgagggccacaacaccgtgaagctgaaggtgacgaagggcggccccctgcccttcgcctgggacatcctgtccccccagttccagtacggctccaaggtgtacgtgaagcaccccgccgacatccccgactacaagaagctgtccttccccgagggcttcaagtgggagcgcgtgatgaacttcgaggacggcggcgtggcgaccgtgacccaggactcctccctgcaggacggctgcttcatctacaaggtgaagttcatcggcgtgaacttcccctccgacggccccgtgatgcagaagaagaccatgggctgggaggcctccaccgagcgcctgtacccccgcgacggcgtgctgaagggcgagacccacaaggccctgaagctgaaggacggcggccactacctggtggagttcaagtccatctacatggccaagaagcccgtgcagctgcccggctactactacgtggacgccaagctggacatcacctcccacaacgaggactacaccatcgtggagcagtacgagcgcaccgagggccgccaccacctgttcctgtagttttgtgatctgatgataagtggttggttcgtgtctcatgcacttgggaggtgatctatttcacctggtgtagtttgtgtttccgtcagttggaaaaacttatccctatcgatttcgttttcattttctgcttttcttttatgtaccttcgtttgggcttgtaacgggcctttgtatttcaactctcaataataatccaagtgcatgttaaacaatttgtcatctgtttcggctttgatatactactggtgaagatgggccgtactactgcatcacaacgaaaaataataataagatgaaaaacttgaagtggaaaaaaaaaaaaacttgaatgttcactactactcattgaccataatgtttaacatacatagctcaatagtatttttgtgaatatggcaacacaaacagtccaaaacaattgtctcttactataccaaaccaagggcgccgcttgtttgccactctttgtgtgcaatagtgtgattaccacatctccacattcaatatattccctgaattatctgacgattttgatggctcactgttttcccaagtcttgaattgtcttctgtgcgccagtcaaatgcatatgtgttgagtttatcttttaaatatcaagcttttgtttttaacttttgtttgtaaccaaaaactcacagtaggagtttgatcacataattttatgtttgcctttgcaatttctagtgagtctttgattaaaagcttgaaaagaaaatgcagccaagcttaccaagtaagttatgtgtattaaccagaggaagagagaatcttgcaaaatttcaacaaacacaaaaagaagtattactacgattggtggagaaagaaaacgattccaaatcttgaactgttgttgtaaaagcatagcagaaagtgggagacaaccgaaatagaaatgactataacttaatttaatgttatcattataatttcttctagcaaatatttagaaagtaaatatcacatcaacctttaatgtaattaagctttctctttttgattcatgtgagatgaaaagaaaaaaaagaagagaaaagtgtagaaaacacatcatttctaagctgaagctgaggtacaaattaattaataagtgactagggtcacgtgaccctagtcacttatgattccgatgacttcgtaggttcctagctcaagccgctcgtgtccaagcgtcacttacgattagctaatgattacggcatctaggaccgactagttcttatgtgcttctagtctccaaatgtggttgatagttattttgctctaagatcaacagtaatgaagtataaatcatcgttgtggtgtgctactcggttaattgagcattaacacacacaaacatgacgaggatggtataatctccaaaaatgtgtactttgttaggtgggaccctatagccttgattaatgtgctatgttaggcatgcctggaaacgtgtgacgcatatgttttgtgaacctgttgatattatatgtgcttttatattaccatattttattaaaatactaatatttattactagtaagatataacattctatctagcttaaaaactaaccataaatattccataataactagatttaccaaactaatatactaaatatacataataaatacaaaattaacaagacaataatcaatatttatgagcttaatatatttagacattatggttggtcgacgataatcatgctaacttttcgtaattgcttgattgaaatatgcttagaataatgcctctttgttctacatggcaaatagggaccattatggtgtaacaccctgggaaccacaaacaccccgaaatgctactaaactacacaactaaccttcatatataaaatttcgacagcatctcctttgaaaatttgcatagacgtggaagcaacagagtataaacagatctagctagctaagtttaaacggccggccaaacgtgcaagcgctactagacaattcagtacattaaaaacgtccgcaatgtgttattaagttgtctaagcgtcaatttatttacaattgaatatatcctgcca

SEQ ID NO: 191 - DNA, 19193 bp, Artificial Sequence
  RV029481 T-DNA
aattacaacggtatatatcctgtcagccaacaccaaaacatcaaaaaaatcgggatcaggatcaggatctgcggccgcatcctgcaggtttaaacggccggccttcactagctagctgctaagctcaaacgagcaggaagcaacgagagggtggcgcgcgaccgacgtgcgtacgtagcatgagcctgagtggagacgttggacgtgtatgtatatacctctctgcgtgttaactatgtacgtaagcggcaggcagtgcaataagtgtggctctgtagtatgtacgtgcgggtacgatgctgtaagctactgaggcaagtccataaataaataatgacacgtgcgtgttctataatctcttcgcttcttcatttgtccccttgcggagtttggcatccattgatgccgttacgctgagaacagacacagcagacgaaccaaaagtgagttcttgtatgaaactatgacccttcatcgctaggctcaaacagcaccccgtacgaacacagcaaattagtcatctaactattagcccctacatgtttcagacgatacataaatatagcccatccttagcaattagctattggccctgcccatcccaagcaatgatctcgaagtatttttaatatatagtatttttaatatgtagcttttaaaattagaagataattttgagacaaaaatctccaagtatttttttgggtattttttactgcctccgtttttctttatttctcgtcacctagtttaattttgtgctaatcggctataaacgaaacagagagaaaagttactctaaaagcaactccaacagattagatataaatcttatatcctgcctagagctgttaaaaagatagacaactttagtggattagtgtatgcaacaaactctccaaatttaagtatcccaactacccaacgcatatcgttcccttttcattggcgcacgaactttcacctgctatagccgacgtacatgttcgttttttttgggcggcgcttactttcttccccgttcgttctcagcatcgcaactcaatttgttatggcggagaagcccttgtatcccaggtagtaatgcacagatatgcattattattattcataaaatcgagctagttaccctatgaggtgacatgaagcgctcacggttactatgacggttagcttcacgactgttggtggcagtagcgtacgacttagctatagttccggacttacctaactgactagagtcacacttagctgaccctagtcacttaataacttcgtatagcatacattatacgaagttatggcgcgccaagcttggatctcctgcaggatctggccggccggatgggcggatctcgtacctcaactttgtatagaaaagttgggccagaatggcccggaccgggttaccaagcggccgcggaattcatcaggatattcttgtttaagatgttgaactctatggaggtttgtatgaactgatgatctaggaccggataagttcccttcttcatagcgaacttattcaaagaatgttttgtgtatcattcttgttacattgttattaatgaaaaaatattattggtcattggactgaacacgagtgttaaatatggaccaggccccaaataagatccattgatatatgaattaaataacaagaataaatcgagtcaccaaaccacttgccttttttaacgagacttgttcaccaacttgatacaaaagtcattatcctatgcaaatcaataatcatacaaaaatatccaataacactaaaaaattaaaagaaatggataatttcacaatatgttatacgataaagaagttacttttccaagaaattcactgattttataagcccacttgcattagataaatggcaaaaaaaaacaaaaaggaaaagaaataaagcacgaagaattctagaaaatacgaaatacgcttcaatgcagtgggacccacggttcaattattgccaattttcagctccaccgtatatttaaaaaataaaacgataatgctaaaaaaatataaatcgtaacgatcgttaaatctcaacggctggatcttatgacgaccgttagaaattgtggttgtcgacgagtcagtaataaacggcgtcaaagtggttgcagccggcacacacgagtcgtgtttatcaactcaaagcacaaatacttttcctcaacctaaaaataaggcaattagccaaaaacaactttgcgtgtaaacaacgctcaatacacgtgtcattttattattagctattgcttcaccgccttagctttctcgtgacctagtcgtcctcgtcttttcttcttcttcttctataaaacaatacccaaagagctcttcttcttcacaattcagatttcaatttctcaaaatcttaaaaactttctctcaattctctctaccgtgatcaaggtaaatttctgtgttccttattctctcaaaatcttcgattttgttttcgttcgatcccaatttcgtatatgttctttggtttagattctgttaatcttagatcgaagacgattttctgggtttgatcgttagatatcatcttaattctcgattagggtttcatagatatcatccgatttgttcaaataatttgagttttgtcgaataattactcttcgatttgtgatttctatctagatctggtgttagtttctagtttgtgcgatcgaatttgtcgattaatctgagtttttctgattaacagcggccgggatccccatggaagaaaacagcaacagcagcagaagcagcaacagcggcgcacgttggaatccgacgccggagcagctgagcattctgaaagagctgtatcatggccgcggaatcaggtcgcccagcgccgaacagatccaccatatctcatggaaactcagctcctacggcaaaatcgagggcaagaacgtcttctactggttccagaaccataaggcccgccagcgtcaaaaagagcgtctcggttccgtcatgcctgcttctgcttcttcttcttcttttgcatctccttctcagggagctgtcggcattcgaaggggaagtacggtgctatgtcttaaggaaacttcagcttcatcttcatcttattcttctgttccgcgttcggtatcagctgtgcgccagtgtgctgcatctcgtgactgtggcttgcaccatgatctgacaactctggagctgtttcccctgcaccgtgaaagtagaatagacgctggggaggaagacgaggagcaacaggaggtggtggtgctagataataataataacacctggacaaggcaccaaaatgtaaatgtgaatcatgcaaataatgacgatgagccacagcatggtcatgggcagattgatattgatgtagggcttcgtctttgcctcggtggatttcgctgaggtacctgacatcttatagtctgcaacctctcgtgtctgaattcctatctttatcaagtgttattgcttccacgactataggacagctttcgtcgaaaggttttgctcatgtgatctcgaaggattcatctagtctgatttttcgtgacttgtatcggttttattggattcatccaacatatatcaataaaaaatgagttgtgtttcctttcttcctagttcagttaaaattatttccctcctgcgcttgtgctgtaattgtctgtgtacctgttgtttgtgactgtgttagttcccttggatatgatttcgtatttgatatgtacatggagatagcttagcttcattattggagtatgaagttagtatgacatagtcactctcctggaaaattgacactgcaaaccatatttttattctgaaccacaaatcctagtcagtccgctggcatatgccgtccgtttgctgaatccagaacgtgggtttggagatgtacggctgagatgcctctatgcgaaggggatttcgtggtgaaacgagatgggagtagagcaacgcccgtggaagatgcttcaaacttccacacttttgagcaacgatcggcagtagtaaggtagacgatttcaagatcaaagcatatgaagataaacaacatcaacaacaaaatttgttggggttctatagagagaaacagagctacatacatacactgttttgtatctaccatctgagatgatgaaaagatgaaaaactaaagaatgccccggcgccaacgccaggacacgccgcgcgcgcgtcacccgagccatctcttgacccagccggcgctgtatatttacacacgttgcagcatcgatcaccacctgttcgatcgcgtcgccgtcaccaagcttggcgcgccggtcacccggtccgggcctagaaggccacccggggctcggcgttaggcttttagtccgctaggtggctagaccgaggttaggacgctagttcactaggggcctagtggtgttttaaggatgggcaagtttgtacaaaaaagcaggctggatcggccagaatggccccggaccgggttaccaagcggccgcttaaaaccttattaagtggcatgggtaacggttcaatatgatcctatcggatcaaaccgggttacatatattattgaacccggttttattggtacgatcgttaagtctcaacatctggctctaataaccgggacgatagagattgtggttagaaataaacggcgttaaaattggttgcagccgcgggcacacggatcgtgtttatcaaataaggcaattagccaaaaaatcgtttcgtgtaaaagttacgtgtcaagctttggttggttattgcttcaccgccttagctttctcgtgaccgactcgtcctcgtctttttttcttcttctataaattaataacctaagacctattcttcttcacaaattcagattccaaatttctcaaactctgaaatcgttctttcaaatctctcaatcgggatcaaggtaaatttctgggttcttattcagtttcttcgattattttccattcgatcgcaatttcgtccctgttctttgagtttgattcggttaatctttgatcggagataaatatctgagtttcatcgctagatctcatctatattctgaactagggttcgtagatttcacagatttgtatatttaggcgtcgattctttgaatttgatccgatatgtgatttatattcagatctggtggtagcttttttaatcggatttgagattatccaagcgattaatctcagttttttgtgaattacagggatccgcccatggaccttaggctcatatttgggcctacctgtaccggcaagacctccaccgcaatcgcattggcccagcaaacagggttgccagttctgtctcttgatagggtgcaatgctgtcctcagctgtccaccggaagtggcaggcctactgttgaggaactcaagggaactaccagactctacttggacgatcgccctttggtgaagggcatcatcactgctaagcaagctcacgagaggcttattgctgaggtgcacaaccacgaggcaaagggcggacttatcttggagggaggctctatatccttgctgagatgcatggctcagtcaagatactggaacgctgatttccgctggcacatcatcagaaacgagctggccgatgaggaatcattcatgtccgttgccaagactcgcgtcaaacagatgctgagaccaagtgccgggttgtctatcattcaagagttggtgcaactctggcgcgaaccaagacttaggcccatccttgaaggcatcgatggttatcgctacgccctccttttcgccacccagaaccaaataactcctgatatgcttctccagctggacgctgacatggaaaacaagctcatccacggaatcgcacaagaattcctgatccacgctcgtcgccaagagcagaagttccctcttgttggcgctaccgccgtcgaagcctttgaaggccctccttttagaatgtagttcgaactggccaggtaccaaacaagtatgaactaaaatgcatgtaggtgtaagagctcatggagagcatggaatattgtatccgaccatgtaacagtataataactgagctccatctcacttcttctatgaataaacaaaggatgttatgatatattaacactctatctatgcaccttattgttctatgataaatttcctcttattattataaatcatctgaatcgtgacggcttatggaatgcttcaaatagtacaaaaacaaatgtgtactataagactttctaaacaattctaaccttagcattgtgaacgagacataagtgttaagaagacataacaattataatggaagaagtttgtctccatttatatattatatattacccacttatgtattatattaggatgttaaggagacataacaattataaagagagaagtttgtatccatttatatattatatactacccatttatatattatacttatccacttatttaatgtctttataaggtttgatccatgatatttctaatattttagttgatatgtatatgaaaaggtactatttgaactctcttactctgtataaaggttggatcatccttaaagtgggtctatttaattttattgcttcttacagataaaaaaaaaattatgagttggtttgataaaatattgaaggatttaaaataataataaataacatataatatatgtatataaatttattataatataacatttatctataaaaaagtaaatattgtcataaatctatacaatcgtttagccttgctggaacgaatctcaattatttaaacgagagtaaacatatttgactttttggttatttaacaaattattatttaacactatatgaaatttttttttttatcagcaaagaataaaattaaattaagaaggacaatggtgtcccaatccttatacaaccaacttccacaagaaagtcaagtcagagacaacaaaaaaacaagcaaaggaaattttttaatttgagttgtcttgtttgctgcataatttatgcagtaaaacactacacataacccttttagcagtagagcaatggttgaccgtgtgcttagcttcttttattttatttttttatcagcaaagaataaataaaataaaatgagacacttcagggatgtttcatgggcgcgccggtcacccggtccgggcctagaaggccacccggggtcggaggagactagccgttagttagtgcagaccgtctctaatcagtgactagcgacgtcccgacccacccagctttcttgtacaaagtggcccggggcggccgaagctggccttctaggcccggaccgggtgaccaagcttggcgcgcccagggcccatcgatatcggtaccctgggatccgatatcttattagtgtttgtgcaaattcgactctacttgagttaggtagacagattcatggattgagtattaagtctagctttgattcttctagctttgtgggaagttctttagtctcgttgtattcaaagtgtggtgttcctgaaggagcttatcaagtttttaacgaggtgcctgtgaagaatctcgggatttggaacgctatgctcaaggcgtatgcgcaacattcacatactcaaaaggttattgaattgttcaaaaggatgaagctttctggaatgaaaccaaatttcataacttttttgaatgtgctcaatgcttgtagtcacgcgggtctagttgatgaagggagatactactttgatcagatgaaagaatcgaggattgagccgacggataagcattacgcttccttggtggatatgttaggacgagctggtagattacaagaagcacttgaagttatcactaatatgccgattgatcccacggaatctgtatggggagctttattaacgagttgtacagtccacaagaacacagagcttgcagcatttgcagcagacaaggtcttcgaattaggaccagtgagttccggtatgcacatttcgttatccaatgcttatgcagccgatggtagattcgaagacgcagctaaagctagaaaattgcttcgagaccgaggggaaaagaaggaaacagggctaagttgggttgaagaaaggaacaaggttcatacatttgcagctggagaaagacgtcatgagaaaagcaaggagatatatgagaagctggctgagttaggggaagagatggagaaagcgggttacattgcagacacaagctatgttctgagagaagtggatggtgacgagaagaatcaaaccataaggtatcatagtgagagattagctattgcttttggactgatcacgtttccagctgatagaccgatccgagtaatgaagaatctgcgtgtttgcggtgattgccataacgcgatcaagttcatgtccgtatgtacgagacgagtgatcattgtgagagataataatcggtttcatcggtttgaagatggcaagtgttcttgtaatgactattggtgaagaagacaaatgagagttggtttatatttaaccataatttcattcagttcacactgaaccggcgaaatttctttgccagacctattcggaattgaaacaagtggagtctcgaaacgaaaagaactttctggaattcgtttgctcacaaagctaaaaacggttgatttcatcgaaatacggcgtcgttttcaaagaacaatccagaaatcactggttttcctttatttcaaaagaagagactagaactttatttctcctctataaaatcactttgttttttcctctcttcttcataaatcaacaaaacaatcacaaatctctcgaaacgctctcgaagttccaaattttctcttagcattctctttcgtttctcgtttgcgttgaatcaaagttcgttgcgggatccaccatgtccaacctgctcacggttcaccagaaccttccggctcttccagtggacgcgacgtccgatgaagtcaggaagaacctcatggacatgttccgcgacaggcaagcgttcagcgagcacacctggaagatgctgctctccgtctgccgctcctgggctgcatggtgcaagctgaacaacaggaagtggttccccgctgagcccgaggacgtgagggattaccttctgtacctgcaagcgcgaggtttgtttctgcttctacctttgatatatatataataattatcattaattagtagtaatataatatttcaaatatttttttcaaaataaaagaatgtagtatatagcaattgcttttctgtagtttataagtgtgtatattttaatttataacttttctaatatatgaccaaaacatggtgatgcctaggtctggcagtgaagaccatccagcaacaccttggacaactgaacatgcttcacaggcgctccggcctcccgcgccccagcgactcgaacgccgtgagcctcgtcatgcgccgcatcaggaaggaaaacgtcgatgccggcgaaagggcaaagcaggccctcgcgttcgagaggaccgatttcgaccaggtccgcagcctgatggagaacagcgacaggtgccaggacattaggaacctggcgttcctcggaattgcatacaacacgctcctcaggatcgcggaaattgcccgcattcgcgtgaaggacattagccgcaccgacggcggcaggatgcttatccacattggcaggaccaagacgctcgtttccaccgcaggcgtcgaaaaggccctcagcctcggagtgaccaagctcgtcgaacgctggatctccgtgtccggcgtcgcggacgacccaaacaactacctcttctgccgcgtccgcaagaacggggtggctgcccctagcgccaccagccaactcagcacgagggccttggaaggtattttcgaggccacccaccgcctgatctacggcgcgaaggatgacagcggtcaacgctacctcgcatggtccgggcactccgcccgcgttggagctgctagggacatggcccgcgccggtgtttccatccccgaaatcatgcaggcgggtggatggacgaacgtgaacattgtcatgaactacattcgcaaccttgacagcgagacgggcgcaatggttcgcctcctggaagatggtgactgaggtaccgttaacagatctactaactatctatactgtaataatgttgtatagccgccggatagctagctagtttagtcattcagcggcgatgggtaataataaagtgtcatccatccatcaccatgcgtggcaacgtgagcaatgacctgattgaacaaattgaaatgaaaagaagaaatatgttatatgtcaacgagatttcctcataatgccactgacgacgtgtgtccaagaaatgtatcagtgatacgtatattcacaatttttttatgacttatactcacaatttgtttttttactacttatactcacaatttgttgtgcgtaccataacaatttcgatcgaatatatatcagaaagttgacgaaagtaagctcactcaaaaagttaaatgggctgcggaagctgcgtcaggcccaagttttggctattctatccggtatccacgattttgatggctgagggacatatgttcgcttaagcttcggtccgggcctagaaggccgatctcccgggcaactttattatacaaagttgatcacgtgagagtctaaaaacggcccctaactaacgcttagttgcccgctagattagtcccccgttagtgcctagttagacacacgacgaactaggggctataaggatttaaatatggtacggatccgtcgacggcgcgccgcggacctgaattccagcacactggcggccgttaataacttcgtatagcatacattatacgaagttatagtggcatcacgtttctagttctagacccatcagctgaggtacaaattacggccagaatggccatctggattcagcagggggtgattgcggttacatcatgtacggaaaaataattctaatccttgatttaaatttgaacttgactatttatttattctttatttcattttgtaaatcattttatgtatctcctggcaagcaattttatccaccttgcaccaacaccttcgggttccataatcaaaccaccttaacttcacaccatgctgtaactcacaccgcccagcatctccaatgtgaaagaagctaaaatttaataaacaatcatacgaagcagtgacaaaataccagatggtattaatgcttcgataaaattaattggaaagtataaaatggtagaaaataataaattataattaatttaagtaagataaaaaataattaaaaactaaaatgttaaaattttaaaaaaattattttaaataatatttaaaaacattaaaaatcattttaaaaaatttatttatagaacaattaaataaatatttcagctaataaaaaacaaaagcttacctagccttagaagacaacttgtccaacaattagatgatacccattgcccttacgttttctttaacatcaattattgtttttgtcaacaagctatcttttagttttattttattggtaaaaaatatgtcgccttcaagttgcatcatttaacacatctcgtcattagaaaaataaaactcttccctaaacgattagtagaaaaaatcattcgataataaataagaaagaaaaattagaaaaaaataacttcattttaaaaaaatcattaaggctatattttttaaatgactaattttatatagactgtaactaaaagtatacaatttattatgctatgtatcttaaagaattacttataaaaatctacggaagaatatcttacaaagtgaaaaacaaatgagaaagaatttagtgggatgattatgattttatttgaaaattgaaaaaataattattaaagactttagtggagtaagaaagctttcctattagtcttttcttatccataaaaaaaaaaaaaaaaatctagcgtgacagcttttccatagattttaataatgtaaaatactggtagcagccgaccgttcaggtaatggacactgtggtcctaacttgcaacgggtgcgggcccaatttaataacgccgtggtaacggataaagccaagcgtgaagcggtgaaggtacatctctgactccgtcaagattacgaaaccgtcaactacgaaggactccccgaaatatcatctgtgtcataaacaccaagtcacaccatacatgggcacgcgtcacaatatgattggagaacggttccaccgcatatgctataaaatgcccccacacccctcgaccctaatcgcacttcaattgcaatcaaattagttcattctctttgcgcagttccctacctctcctttcaaggttcgtagatttcttccgtttttttttcttcttctttattgtttgttctacatcagcatgatgttgatttgattgtgttttctatcgtttcatcgattataaattttcataatcagaagattcagcttttattaatgcaagaacgtccttaattgatgattttataaccgtaaattaggtctaattagagtttttttcataaagattttcagatccgtttacaacaagccttaattgttgattctgtagtcgtagattaaggtttttttcatgaactacttcagatccgttaaacaacagccttatttgttgatacttcagtcgtttttcaagaaattgttcagatccgttgataaaagccttattcgttgattctgtatggtatttcaagagatattgctcaggtcctttagcaactaccttatttgttgattctgtggccatagattaggattttttttcacgaaattgcttcttgaaattacgtgatggattttgattctgatttatcttgtgattgttgactctacagccatggctgcaactactcttacatctgctttacctggtgctttcagttcatcccagagaccaagtgctcctttcaacttacaaagatcacctagagtgcttagaaggttcaacagaaagacaggacgtcaacctcgtggacttgttcgtgctgcaaaggctcaagcggcgcaaaacctgccagagaaattcgatgaaacaagactctgggaggccctcaggggatttggggttagtccaagtagggttacttacgctcccgtcggattcggagattaccactggaccgtcacagatgaagacgggagaccttggttcgcaactgtcagtgacctcgaacacaaagagcattgcgggcagggagcacaagcagcccttaaaggactcagacaagctatggacactgccctcgcacttagagatagggacggactcagattcgtggttgctccagtggcagcaacagatgggggtggccctgtccttccccttgacgctaggtatgcactcacagtcttccctcacgtcccaggaagaacaggagagttcggacaaagactcacagaggcagagagggacagactgcttgctcttctggcagaactccacggaagaacacctcctgaaacaaccccaccagccgatatggaaccaccaggacttcctggtgttagagcagcactcgccgaaagtgaaggaccttggagtggaggaccatttgcagaacccgctagacttcttctcagagaacacgaggccacactgcacgcaagactcgctgaattcgaagccctcgtcgcaagagttaagggtcgtggagcacctcttgtcgttacccacggagaaccacacccaggcaacttgatcctcggagaggaaggctatctcctcgtggactgggatacagttggactggctccagctgaaagggatttgagtctcatctcagacgacccagctgacctcgcaagatacgcagagcttacaggaagaactccagacccagacgcactcgcactctatagactgcgttggagtctccttgatgtggctgagttcgtcgagtggttcagggctgaacaccaaagaacccaagacaccgagagtgcatggaaggggttcactgacacacttgggcaattggctgctggtggatcagctgcatagcaaacttatctctgttatgaatcagaagaagttcatgtctcgtttcatttaaaactttggtggtttgtgttttggggccttgtaaagcccctgatgaataattgttcaactatgtttccgttcctgtgttatacctttctttctaatgagtaatgacatcaaacttcttctgtattgaaattatgtccttgtgagtctctttatcatcgtttcgtctttacattatatgtgctacttttgtctaatgagcctgaaaagtggctccaatggtacgcactggaagatttgttggcttctggtagatatagcgacagtgttgagcttgtaatatcatgtctcttattgctaaattagttcctttcttaacagaaaccttcaaagtttttgtttttgttttcatttacctaatgtacacatacgctggccatgactaacaacatgtccaggcttagagcatatttttttctagcttaaattgttaacttgtcattcagtaaaatccgagaattgtgaagctctaattgaagctaattcgttttataaagtcagttaaaaagtatactaaattatccaacttttcttcaaaatctcaaaattctatgacaaaacgatagtctttgtttatgtcagtaccacaaagaggtggaaaaaaacaccaaaaaaacaataagcaaactatacactgagaagaaaaataaaagagagctcaatagatgttttatactaacggtagattagatcaaagatccaagctttactctacatagagcagaacccagaatcccttcatatctcttttattctagcaccgataatctactgaaaagaagacacttagagctctgtctctttgtcaaagaagtcccagccgtcatccagaagctccttacgttcattaacagaggccgcaattggatcgggtttacttattttgtgggtatctatacttttattagatttttaatcaggctcctgatttctttttatttcgattgaattcctgaacttgtattattcagtagatcgaataaattataaaaagataaaatcataaaataatattttatcctatcaatcatattaaagcaatgaatatgtaaaattaatcttatctttattttaaaaaatcatataggtttagtatttttttaaaaataaagataggattagttttactattcactgcttattacttttaaaaaaatcataaaggtttagtatttttttaaaataaatataggaatagttttactattcactgctttaatagaaaaatagtttaaaatttaagatagttttaatcccagcatttgccacgtttgaacgtgagccgaaacgatgtcgttacattatcttaacctagctgaaacgatgtcgtcataatatcgccaaatgccaactggactacgtcgaacccacaaatcccacaaagcgcgtgaaatcaaatcgctcaaaccacaaaaaagaacaacgcgtttgttacacgctcaatcccacgcgagtagagcacagtaaccttcaaataagcgaatggggcataatcagaaatccgaaataaacctaggggcattatcggaaatgaaaagtagctcactcaatataaaaatctaggaaccctagttttcgttatcactctgtgctccctcgctctatttctcagtctctgtgtttgcggctgaggattccgaacgagtgaccttcttcgtttctcgcaaaggtaacagcctctgctcttgtctcttcgattcgatctatgcctgtctcttatttacgatgatgtttcttcggttatgtttttttatttatgctttatgctgttgatgttcggttgtttgtttcgctttgtttttgtggttcagttttttaggattcttttggtttttgaatcgattaatcggaagagattttcgagttatttggtgtgttggaggtgaatcttttttttgaggtcatagatctgttgtatttgtgttataaacatgcgactttgtatgattttttacgaggttatgatgttctggttgttttattatgaatctgttgagacagaaccatgatttttgttgatgttcgtttacactattaaaggtttgttttaacaggattaaaagttttttaagcatgttgaaggagtcttgtagatatgtaaccgtcgatagtttttttgtgggtttgttcacatgttatcaagcttaatcttttactatgtatgcgaccatatctggatccagcaaaggcgattttttaattccttgtgaaacttttgtaatatgaagttgaaattttgttattggtaaactataaatgtgtgaagttggagtatacctttaccttcttatttggctttgtgatagtttaatttatatgtattttgagttctgacttgtatttctttgaattgattctagtttaagtaatcatggcctcctccgagaacgtcatcaccgagttcatgcgcttcaaggtgcgcatggagggcaccgtgaacggccacgagttcgagatcgagggcgagggcgagggccgcccctacgagggccacaacaccgtgaagctgaaggtgacgaagggcggccccctgcccttcgcctgggacatcctgtccccccagttccagtacggctccaaggtgtacgtgaagcaccccgccgacatccccgactacaagaagctgtccttccccgagggcttcaagtgggagcgcgtgatgaacttcgaggacggcggcgtggcgaccgtgacccaggactcctccctgcaggacggctgcttcatctacaaggtgaagttcatcggcgtgaacttcccctccgacggccccgtgatgcagaagaagaccatgggctgggaggcctccaccgagcgcctgtacccccgcgacggcgtgctgaagggcgagacccacaaggccctgaagctgaaggacggcggccactacctggtggagttcaagtccatctacatggccaagaagcccgtgcagctgcccggctactactacgtggacgccaagctggacatcacctcccacaacgaggactacaccatcgtggagcagtacgagcgcaccgagggccgccaccacctgttcctgtagttttgtgatctgatgataagtggttggttcgtgtctcatgcacttgggaggtgatctatttcacctggtgtagtttgtgtttccgtcagttggaaaaacttatccctatcgatttcgttttcattttctgcttttcttttatgtaccttcgtttgggcttgtaacgggcctttgtatttcaactctcaataataatccaagtgcatgttaaacaatttgtcatctgtttcggctttgatatactactggtgaagatgggccgtactactgcatcacaacgaaaaataataataagatgaaaaacttgaagtggaaaaaaaaaaaaacttgaatgttcactactactcattgaccataatgtttaacatacatagctcaatagtatttttgtgaatatggcaacacaaacagtccaaaacaattgtctcttactataccaaaccaagggcgccgcttgtttgccactctttgtgtgcaatagtgtgattaccacatctccacattcaatatattccctgaattatctgacgattttgatggctcactgttttcccaagtcttgaattgtcttctgtgcgccagtcaaatgcatatgtgttgagtttatcttttaaatatcaagcttttgtttttaacttttgtttgtaaccaaaaactcacagtaggagtttgatcacataattttatgtttgcctttgcaatttctagtgagtctttgattaaaagcttgaaaagaaaatgcagccaagcttaccaagtaagttatgtgtattaaccagaggaagagagaatcttgcaaaatttcaacaaacacaaaaagaagtattactacgattggtggagaaagaaaacgattccaaatcttgaactgttgttgtaaaagcatagcagaaagtgggagacaaccgaaatagaaatgactataacttaatttaatgttatcattataatttcttctagcaaatatttagaaagtaaatatcacatcaacctttaatgtaattaagctttctctttttgattcatgtgagatgaaaagaaaaaaaagaagagaaaagtgtagaaaacacatcatttctaagctgaagctgaggtacaaattaattaataagtgactagggtcacgtgaccctagtcacttatgattccgatgacttcgtaggttcctagctcaagccgctcgtgtccaagcgtcacttacgattagctaatgattacggcatctaggaccgactagttcttatgtgcttctagtctccaaatgtggttgatagttattttgctctaagatcaacagtaatgaagtataaatcatcgttgtggtgtgctactcggttaattgagcattaacacacacaaacatgacgaggatggtataatctccaaaaatgtgtactttgttaggtgggaccctatagccttgattaatgtgctatgttaggcatgcctggaaacgtgtgacgcatatgttttgtgaacctgttgatattatatgtgcttttatattaccatattttattaaaatactaatatttattactagtaagatataacattctatctagcttaaaaactaaccataaatattccataataactagatttaccaaactaatatactaaatatacataataaatacaaaattaacaagacaataatcaatatttatgagcttaatatatttagacattatggttggtcgacgataatcatgctaacttttcgtaattgcttgattgaaatatgcttagaataatgcctctttgttctacatggcaaatagggaccattatggtgtaacaccctgggaaccacaaacaccccgaaatgctactaaactacacaactaaccttcatatataaaatttcgacagcatctcctttgaaaatttgcatagacgtggaagcaacagagtataaacagatctagctagctaagtttaaacggccggccaaacgtgcaagcgctactagacaattcagtacattaaaaacgtccgcaatgtgttattaagttgtctaagcgtcaatttatttacaattgaatatatcctgcca

SEQ ID NO: 192 - DNA, 16345 bp, Artificial Sequence
  RV029631 T-DNA
aattacaacggtatatatcctgtcagccaacaccaaaacatcaaaaaaatcgggatcaggatcaggatctgcggccgcatcctgcaggtttaaacggccggccttcactagctagctgctaagctcaaacgagcaggaagcaacgagagggtggcgcgcgaccgacgtgcgtacgtagcatgagcctgagtggagacgttggacgtgtatgtatatacctctctgcgtgttaactatgtacgtaagcggcaggcagtgcaataagtgtggctctgtagtatgtacgtgcgggtacgatgctgtaagctactgaggcaagtccataaataaataatgacacgtgcgtgttctataatctcttcgcttcttcatttgtccccttgcggagtttggcatccattgatgccgttacgctgagaacagacacagcagacgaaccaaaagtgagttcttgtatgaaactatgacccttcatcgctaggctcaaacagcaccccgtacgaacacagcaaattagtcatctaactattagcccctacatgtttcagacgatacataaatatagcccatccttagcaattagctattggccctgcccatcccaagcaatgatctcgaagtatttttaatatatagtatttttaatatgtagcttttaaaattagaagataattttgagacaaaaatctccaagtatttttttgggtattttttactgcctccgtttttctttatttctcgtcacctagtttaattttgtgctaatcggctataaacgaaacagagagaaaagttactctaaaagcaactccaacagattagatataaatcttatatcctgcctagagctgttaaaaagatagacaactttagtggattagtgtatgcaacaaactctccaaatttaagtatcccaactacccaacgcatatcgttcccttttcattggcgcacgaactttcacctgctatagccgacgtacatgttcgttttttttgggcggcgcttactttcttccccgttcgttctcagcatcgcaactcaatttgttatggcggagaagcccttgtatcccaggtagtaatgcacagatatgcattattattattcataaaatcgagctagttaccctatgaggtgacatgaagcgctcacggttactatgacggttagcttcacgactgttggtggcagtagcgtacgacttagctatagttccggacttacctaactgactagagtcacacttagctgaccctagtcacttaataacttcgtatagcatacattatacgaagttatggcgcgccaagcttggatctcctgcaggatctggccggccggatgggcggatctcgtacctcaactttgtatagaaaagttgggccagaatggcccggaccgggttaccaagcggccgcggaattcatcaggatattcttgtttaagatgttgaactctatggaggtttgtatgaactgatgatctaggaccggataagttcccttcttcatagcgaacttattcaaagaatgttttgtgtatcattcttgttacattgttattaatgaaaaaatattattggtcattggactgaacacgagtgttaaatatggaccaggccccaaataagatccattgatatatgaattaaataacaagaataaatcgagtcaccaaaccacttgccttttttaacgagacttgttcaccaacttgatacaaaagtcattatcctatgcaaatcaataatcatacaaaaatatccaataacactaaaaaattaaaagaaatggataatttcacaatatgttatacgataaagaagttacttttccaagaaattcactgattttataagcccacttgcattagataaatggcaaaaaaaaacaaaaaggaaaagaaataaagcacgaagaattctagaaaatacgaaatacgcttcaatgcagtgggacccacggttcaattattgccaattttcagctccaccgtatatttaaaaaataaaacgataatgctaaaaaaatataaatcgtaacgatcgttaaatctcaacggctggatcttatgacgaccgttagaaattgtggttgtcgacgagtcagtaataaacggcgtcaaagtggttgcagccggcacacacgagtcgtgtttatcaactcaaagcacaaatacttttcctcaacctaaaaataaggcaattagccaaaaacaactttgcgtgtaaacaacgctcaatacacgtgtcattttattattagctattgcttcaccgccttagctttctcgtgacctagtcgtcctcgtcttttcttcttcttcttctataaaacaatacccaaagagctcttcttcttcacaattcagatttcaatttctcaaaatcttaaaaactttctctcaattctctctaccgtgatcaaggtaaatttctgtgttccttattctctcaaaatcttcgattttgttttcgttcgatcccaatttcgtatatgttctttggtttagattctgttaatcttagatcgaagacgattttctgggtttgatcgttagatatcatcttaattctcgattagggtttcatagatatcatccgatttgttcaaataatttgagttttgtcgaataattactcttcgatttgtgatttctatctagatctggtgttagtttctagtttgtgcgatcgaatttgtcgattaatctgagtttttctgattaacagcggccgggatccccatggaagaaaacagcaacagcagcagaagcagcaacagcggcgcacgttggaatccgacgccggagcagctgagcattctgaaagagctgtatcatggccgcggaatcaggtcgcccagcgccgaacagatccaccatatctcatggaaactcagctcctacggcaaaatcgagggcaagaacgtcttctactggttccagaaccataaggcccgccagcgtcaaaaagagcgtctcggttccgtcatgcctgcttctgcttcttcttcttcttttgcatctccttctcagggagctgtcggcattcgaaggggaagtacggtgctatgtcttaaggaaacttcagcttcatcttcatcttattcttctgttccgcgttcggtatcagctgtgcgccagtgtgctgcatctcgtgactgtggcttgcaccatgatctgacaactctggagctgtttcccctgcaccgtgaaagtagaatagacgctggggaggaagacgaggagcaacaggaggtggtggtgctagataataataataacacctggacaaggcaccaaaatgtaaatgtgaatcatgcaaataatgacgatgagccacagcatggtcatgggcagattgatattgatgtagggcttcgtctttgcctcggtggatttcgctgaggtacctgacatcttatagtctgcaacctctcgtgtctgaattcctatctttatcaagtgttattgcttccacgactataggacagctttcgtcgaaaggttttgctcatgtgatctcgaaggattcatctagtctgatttttcgtgacttgtatcggttttattggattcatccaacatatatcaataaaaaatgagttgtgtttcctttcttcctagttcagttaaaattatttccctcctgcgcttgtgctgtaattgtctgtgtacctgttgtttgtgactgtgttagttcccttggatatgatttcgtatttgatatgtacatggagatagcttagcttcattattggagtatgaagttagtatgacatagtcactctcctggaaaattgacactgcaaaccatatttttattctgaaccacaaatcctagtcagtccgctggcatatgccgtccgtttgctgaatccagaacgtgggtttggagatgtacggctgagatgcctctatgcgaaggggatttcgtggtgaaacgagatgggagtagagcaacgcccgtggaagatgcttcaaacttccacacttttgagcaacgatcggcagtagtaaggtagacgatttcaagatcaaagcatatgaagataaacaacatcaacaacaaaatttgttggggttctatagagagaaacagagctacatacatacactgttttgtatctaccatctgagatgatgaaaagatgaaaaactaaagaatgccccggcgccaacgccaggacacgccgcgcgcgcgtcacccgagccatctcttgacccagccggcgctgtatatttacacacgttgcagcatcgatcaccacctgttcgatcgcgtcgccgtcaccaagcttggcgcgccggtcacccggtccgggcctagaaggccacccggggctcggcgttaggcttttagtccgctaggtggctagaccgaggttaggacgctagttcactaggggcctagtggtgttttaaggatgggcaagtttgtacaaaaaagcaggctccggccagaatggcccggaccgggttaccgaattcgagctcggtaccctgggatccgatatcttattagtgtttgtgcaaattcgactctacttgagttaggtagacagattcatggattgagtattaagtctagctttgattcttctagctttgtgggaagttctttagtctcgttgtattcaaagtgtggtgttcctgaaggagcttatcaagtttttaacgaggtgcctgtgaagaatctcgggatttggaacgctatgctcaaggcgtatgcgcaacattcacatactcaaaaggttattgaattgttcaaaaggatgaagctttctggaatgaaaccaaatttcataacttttttgaatgtgctcaatgcttgtagtcacgcgggtctagttgatgaagggagatactactttgatcagatgaaagaatcgaggattgagccgacggataagcattacgcttccttggtggatatgttaggacgagctggtagattacaagaagcacttgaagttatcactaatatgccgattgatcccacggaatctgtatggggagctttattaacgagttgtacagtccacaagaacacagagcttgcagcatttgcagcagacaaggtcttcgaattaggaccagtgagttccggtatgcacatttcgttatccaatgcttatgcagccgatggtagattcgaagacgcagctaaagctagaaaattgcttcgagaccgaggggaaaagaaggaaacagggctaagttgggttgaagaaaggaacaaggttcatacatttgcagctggagaaagacgtcatgagaaaagcaaggagatatatgagaagctggctgagttaggggaagagatggagaaagcgggttacattgcagacacaagctatgttctgagagaagtggatggtgacgagaagaatcaaaccataaggtatcatagtgagagattagctattgcttttggactgatcacgtttccagctgatagaccgatccgagtaatgaagaatctgcgtgtttgcggtgattgccataacgcgatcaagttcatgtccgtatgtacgagacgagtgatcattgtgagagataataatcggtttcatcggtttgaagatggcaagtgttcttgtaatgactattggtgaagaagacaaatgagagttggtttatatttaaccataatttcattcagttcacactgaaccggcgaaatttctttgccagacctattcggaattgaaacaagtggagtctcgaaacgaaaagaactttctggaattcgtttgctcacaaagctaaaaacggttgatttcatcgaaatacggcgtcgttttcaaagaacaatccagaaatcactggttttcctttatttcaaaagaagagactagaactttatttctcctctataaaatcactttgttttttcctctcttcttcataaatcaacaaaacaatcacaaatctctcgaaacgctctcgaagttccaaattttctcttagcattctctttcgtttctcgtttgcgttgaatcaaagttcgttgcgggatccaccatgtccaacctgctcacggttcaccagaaccttccggctcttccagtggacgcgacgtccgatgaagtcaggaagaacctcatggacatgttccgcgacaggcaagcgttcagcgagcacacctggaagatgctgctctccgtctgccgctcctgggctgcatggtgcaagctgaacaacaggaagtggttccccgctgagcccgaggacgtgagggattaccttctgtacctgcaagcgcgaggtttgtttctgcttctacctttgatatatatataataattatcattaattagtagtaatataatatttcaaatatttttttcaaaataaaagaatgtagtatatagcaattgcttttctgtagtttataagtgtgtatattttaatttataacttttctaatatatgaccaaaacatggtgatgcctaggtctggcagtgaagaccatccagcaacaccttggacaactgaacatgcttcacaggcgctccggcctcccgcgccccagcgactcgaacgccgtgagcctcgtcatgcgccgcatcaggaaggaaaacgtcgatgccggcgaaagggcaaagcaggccctcgcgttcgagaggaccgatttcgaccaggtccgcagcctgatggagaacagcgacaggtgccaggacattaggaacctggcgttcctcggaattgcatacaacacgctcctcaggatcgcggaaattgcccgcattcgcgtgaaggacattagccgcaccgacggcggcaggatgcttatccacattggcaggaccaagacgctcgtttccaccgcaggcgtcgaaaaggccctcagcctcggagtgaccaagctcgtcgaacgctggatctccgtgtccggcgtcgcggacgacccaaacaactacctcttctgccgcgtccgcaagaacggggtggctgcccctagcgccaccagccaactcagcacgagggccttggaaggtattttcgaggccacccaccgcctgatctacggcgcgaaggatgacagcggtcaacgctacctcgcatggtccgggcactccgcccgcgttggagctgctagggacatggcccgcgccggtgtttccatccccgaaatcatgcaggcgggtggatggacgaacgtgaacattgtcatgaactacattcgcaaccttgacagcgagacgggcgcaatggttcgcctcctggaagatggtgactgaggtaccgttaacagatctactaactatctatactgtaataatgttgtatagccgccggatagctagctagtttagtcattcagcggcgatgggtaataataaagtgtcatccatccatcaccatgcgtggcaacgtgagcaatgacctgattgaacaaattgaaatgaaaagaagaaatatgttatatgtcaacgagatttcctcataatgccactgacgacgtgtgtccaagaaatgtatcagtgatacgtatattcacaatttttttatgacttatactcacaatttgtttttttactacttatactcacaatttgttgtgcgtaccataacaatttcgatcgaatatatatcagaaagttgacgaaagtaagctcactcaaaaagttaaatgggctgcggaagctgcgtcaggcccaagttttggctattctatccggtatccacgattttgatggctgagggacatatgttcgcttaagcttcggtccgggcctagaaggccgatctcccgggcaactttattatacaaagttgatcacgtgagagtctaaaaacggcccctaactaacgcttagttgcccgctagattagtcccccgttagtgcctagttagacacacgacgaactaggggctataaggatttaaatatggtacggatccgtcgacggcgcgccgcggacctgaattccagcacactggcggccgttaataacttcgtatagcatacattatacgaagttatagtggcatcacgtttctagttctagacccatcagctgaggtacaaattacggccagaatggccatctggattcagcagggggtgattgcggttacatcatgtacggaaaaataattctaatccttgatttaaatttgaacttgactatttatttattctttatttcattttgtaaatcattttatgtatctcctggcaagcaattttatccaccttgcaccaacaccttcgggttccataatcaaaccaccttaacttcacaccatgctgtaactcacaccgcccagcatctccaatgtgaaagaagctaaaatttaataaacaatcatacgaagcagtgacaaaataccagatggtattaatgcttcgataaaattaattggaaagtataaaatggtagaaaataataaattataattaatttaagtaagataaaaaataattaaaaactaaaatgttaaaattttaaaaaaattattttaaataatatttaaaaacattaaaaatcattttaaaaaatttatttatagaacaattaaataaatatttcagctaataaaaaacaaaagcttacctagccttagaagacaacttgtccaacaattagatgatacccattgcccttacgttttctttaacatcaattattgtttttgtcaacaagctatcttttagttttattttattggtaaaaaatatgtcgccttcaagttgcatcatttaacacatctcgtcattagaaaaataaaactcttccctaaacgattagtagaaaaaatcattcgataataaataagaaagaaaaattagaaaaaaataacttcattttaaaaaaatcattaaggctatattttttaaatgactaattttatatagactgtaactaaaagtatacaatttattatgctatgtatcttaaagaattacttataaaaatctacggaagaatatcttacaaagtgaaaaacaaatgagaaagaatttagtgggatgattatgattttatttgaaaattgaaaaaataattattaaagactttagtggagtaagaaagctttcctattagtcttttcttatccataaaaaaaaaaaaaaaaatctagcgtgacagcttttccatagattttaataatgtaaaatactggtagcagccgaccgttcaggtaatggacactgtggtcctaacttgcaacgggtgcgggcccaatttaataacgccgtggtaacggataaagccaagcgtgaagcggtgaaggtacatctctgactccgtcaagattacgaaaccgtcaactacgaaggactccccgaaatatcatctgtgtcataaacaccaagtcacaccatacatgggcacgcgtcacaatatgattggagaacggttccaccgcatatgctataaaatgcccccacacccctcgaccctaatcgcacttcaattgcaatcaaattagttcattctctttgcgcagttccctacctctcctttcaaggttcgtagatttcttccgtttttttttcttcttctttattgtttgttctacatcagcatgatgttgatttgattgtgttttctatcgtttcatcgattataaattttcataatcagaagattcagcttttattaatgcaagaacgtccttaattgatgattttataaccgtaaattaggtctaattagagtttttttcataaagattttcagatccgtttacaacaagccttaattgttgattctgtagtcgtagattaaggtttttttcatgaactacttcagatccgttaaacaacagccttatttgttgatacttcagtcgtttttcaagaaattgttcagatccgttgataaaagccttattcgttgattctgtatggtatttcaagagatattgctcaggtcctttagcaactaccttatttgttgattctgtggccatagattaggattttttttcacgaaattgcttcttgaaattacgtgatggattttgattctgatttatcttgtgattgttgactctacagccatggctgcaactactcttacatctgctttacctggtgctttcagttcatcccagagaccaagtgctcctttcaacttacaaagatcacctagagtgcttagaaggttcaacagaaagacaggacgtcaacctcgtggacttgttcgtgctgcaaaggctcaagcggcgcaaaacctgccagagaaattcgatgaaacaagactctgggaggccctcaggggatttggggttagtccaagtagggttacttacgctcccgtcggattcggagattaccactggaccgtcacagatgaagacgggagaccttggttcgcaactgtcagtgacctcgaacacaaagagcattgcgggcagggagcacaagcagcccttaaaggactcagacaagctatggacactgccctcgcacttagagatagggacggactcagattcgtggttgctccagtggcagcaacagatgggggtggccctgtccttccccttgacgctaggtatgcactcacagtcttccctcacgtcccaggaagaacaggagagttcggacaaagactcacagaggcagagagggacagactgcttgctcttctggcagaactccacggaagaacacctcctgaaacaaccccaccagccgatatggaaccaccaggacttcctggtgttagagcagcactcgccgaaagtgaaggaccttggagtggaggaccatttgcagaacccgctagacttcttctcagagaacacgaggccacactgcacgcaagactcgctgaattcgaagccctcgtcgcaagagttaagggtcgtggagcacctcttgtcgttacccacggagaaccacacccaggcaacttgatcctcggagaggaaggctatctcctcgtggactgggatacagttggactggctccagctgaaagggatttgagtctcatctcagacgacccagctgacctcgcaagatacgcagagcttacaggaagaactccagacccagacgcactcgcactctatagactgcgttggagtctccttgatgtggctgagttcgtcgagtggttcagggctgaacaccaaagaacccaagacaccgagagtgcatggaaggggttcactgacacacttgggcaattggctgctggtggatcagctgcatagcaaacttatctctgttatgaatcagaagaagttcatgtctcgtttcatttaaaactttggtggtttgtgttttggggccttgtaaagcccctgatgaataattgttcaactatgtttccgttcctgtgttatacctttctttctaatgagtaatgacatcaaacttcttctgtattgaaattatgtccttgtgagtctctttatcatcgtttcgtctttacattatatgtgctacttttgtctaatgagcctgaaaagtggctccaatggtacgcactggaagatttgttggcttctggtagatatagcgacagtgttgagcttgtaatatcatgtctcttattgctaaattagttcctttcttaacagaaaccttcaaagtttttgtttttgttttcatttacctaatgtacacatacgctggccatgactaacaacatgtccaggcttagagcatatttttttctagcttaaattgttaacttgtcattcagtaaaatccgagaattgtgaagctctaattgaagctaattcgttttataaagtcagttaaaaagtatactaaattatccaacttttcttcaaaatctcaaaattctatgacaaaacgatagtctttgtttatgtcagtaccacaaagaggtggaaaaaaacaccaaaaaaacaataagcaaactatacactgagaagaaaaataaaagagagctcaatagatgttttatactaacggtagattagatcaaagatccaagctttactctacatagagcagaacccagaatcccttcatatctcttttattctagcaccgataatctactgaaaagaagacacttagagctctgtctctttgtcaaagaagtcccagccgtcatccagaagctccttacgttcattaacagaggccgcaattggatcgggtttacttattttgtgggtatctatacttttattagatttttaatcaggctcctgatttctttttatttcgattgaattcctgaacttgtattattcagtagatcgaataaattataaaaagataaaatcataaaataatattttatcctatcaatcatattaaagcaatgaatatgtaaaattaatcttatctttattttaaaaaatcatataggtttagtatttttttaaaaataaagataggattagttttactattcactgcttattacttttaaaaaaatcataaaggtttagtatttttttaaaataaatataggaatagttttactattcactgctttaatagaaaaatagtttaaaatttaagatagttttaatcccagcatttgccacgtttgaacgtgagccgaaacgatgtcgttacattatcttaacctagctgaaacgatgtcgtcataatatcgccaaatgccaactggactacgtcgaacccacaaatcccacaaagcgcgtgaaatcaaatcgctcaaaccacaaaaaagaacaacgcgtttgttacacgctcaatcccacgcgagtagagcacagtaaccttcaaataagcgaatggggcataatcagaaatccgaaataaacctaggggcattatcggaaatgaaaagtagctcactcaatataaaaatctaggaaccctagttttcgttatcactctgtgctccctcgctctatttctcagtctctgtgtttgcggctgaggattccgaacgagtgaccttcttcgtttctcgcaaaggtaacagcctctgctcttgtctcttcgattcgatctatgcctgtctcttatttacgatgatgtttcttcggttatgtttttttatttatgctttatgctgttgatgttcggttgtttgtttcgctttgtttttgtggttcagttttttaggattcttttggtttttgaatcgattaatcggaagagattttcgagttatttggtgtgttggaggtgaatcttttttttgaggtcatagatctgttgtatttgtgttataaacatgcgactttgtatgattttttacgaggttatgatgttctggttgttttattatgaatctgttgagacagaaccatgatttttgttgatgttcgtttacactattaaaggtttgttttaacaggattaaaagttttttaagcatgttgaaggagtcttgtagatatgtaaccgtcgatagtttttttgtgggtttgttcacatgttatcaagcttaatcttttactatgtatgcgaccatatctggatccagcaaaggcgattttttaattccttgtgaaacttttgtaatatgaagttgaaattttgttattggtaaactataaatgtgtgaagttggagtatacctttaccttcttatttggctttgtgatagtttaatttatatgtattttgagttctgacttgtatttctttgaattgattctagtttaagtaatcatggcctcctccgagaacgtcatcaccgagttcatgcgcttcaaggtgcgcatggagggcaccgtgaacggccacgagttcgagatcgagggcgagggcgagggccgcccctacgagggccacaacaccgtgaagctgaaggtgacgaagggcggccccctgcccttcgcctgggacatcctgtccccccagttccagtacggctccaaggtgtacgtgaagcaccccgccgacatccccgactacaagaagctgtccttccccgagggcttcaagtgggagcgcgtgatgaacttcgaggacggcggcgtggcgaccgtgacccaggactcctccctgcaggacggctgcttcatctacaaggtgaagttcatcggcgtgaacttcccctccgacggccccgtgatgcagaagaagaccatgggctgggaggcctccaccgagcgcctgtacccccgcgacggcgtgctgaagggcgagacccacaaggccctgaagctgaaggacggcggccactacctggtggagttcaagtccatctacatggccaagaagcccgtgcagctgcccggctactactacgtggacgccaagctggacatcacctcccacaacgaggactacaccatcgtggagcagtacgagcgcaccgagggccgccaccacctgttcctgtagttttgtgatctgatgataagtggttggttcgtgtctcatgcacttgggaggtgatctatttcacctggtgtagtttgtgtttccgtcagttggaaaaacttatccctatcgatttcgttttcattttctgcttttcttttatgtaccttcgtttgggcttgtaacgggcctttgtatttcaactctcaataataatccaagtgcatgttaaacaatttgtcatctgtttcggctttgatatactactggtgaagatgggccgtactactgcatcacaacgaaaaataataataagatgaaaaacttgaagtggaaaaaaaaaaaaacttgaatgttcactactactcattgaccataatgtttaacatacatagctcaatagtatttttgtgaatatggcaacacaaacagtccaaaacaattgtctcttactataccaaaccaagggcgccgcttgtttgccactctttgtgtgcaatagtgtgattaccacatctccacattcaatatattccctgaattatctgacgattttgatggctcactgttttcccaagtcttgaattgtcttctgtgcgccagtcaaatgcatatgtgttgagtttatcttttaaatatcaagcttttgtttttaacttttgtttgtaaccaaaaactcacagtaggagtttgatcacataattttatgtttgcctttgcaatttctagtgagtctttgattaaaagcttgaaaagaaaatgcagccaagcttaccaagtaagttatgtgtattaaccagaggaagagagaatcttgcaaaatttcaacaaacacaaaaagaagtattactacgattggtggagaaagaaaacgattccaaatcttgaactgttgttgtaaaagcatagcagaaagtgggagacaaccgaaatagaaatgactataacttaatttaatgttatcattataatttcttctagcaaatatttagaaagtaaatatcacatcaacctttaatgtaattaagctttctctttttgattcatgtgagatgaaaagaaaaaaaagaagagaaaagtgtagaaaacacatcatttctaagctgaagctgaggtacaaattaattaataagtgactagggtcacgtgaccctagtcacttatgattccgatgacttcgtaggttcctagctcaagccgctcgtgtccaagcgtcacttacgattagctaatgattacggcatctaggaccgactagttcttatgtgcttctagtctccaaatgtggttgatagttattttgctctaagatcaacagtaatgaagtataaatcatcgttgtggtgtgctactcggttaattgagcattaacacacacaaacatgacgaggatggtataatctccaaaaatgtgtactttgttaggtgggaccctatagccttgattaatgtgctatgttaggcatgcctggaaacgtgtgacgcatatgttttgtgaacctgttgatattatatgtgcttttatattaccatattttattaaaatactaatatttattactagtaagatataacattctatctagcttaaaaactaaccataaatattccataataactagatttaccaaactaatatactaaatatacataataaatacaaaattaacaagacaataatcaatatttatgagcttaatatatttagacattatggttggtcgacgataatcatgctaacttttcgtaattgcttgattgaaatatgcttagaataatgcctctttgttctacatggcaaatagggaccattatggtgtaacaccctgggaaccacaaacaccccgaaatgctactaaactacacaactaaccttcatatataaaatttcgacagcatctcctttgaaaatttgcatagacgtggaagcaacagagtataaacagatctagctagctaagtttaaacggccggccaaacgtgcaagcgctactagacaattcagtacattaaaaacgtccgcaatgtgttattaagttgtctaagcgtcaatttatttacaattgaatatatcctgcca

SEQ ID NO: 193 - DNA, 16476 bp, Artificial Sequence
  RV029630 T-DNA
aattacaacggtatatatcctgtcagccaacaccaaaacatcaaaaaaatcgggatcaggatcaggatctgcggccgcatcctgcaggtttaaacggccggccttcactagctagctgctaagctcaaacgagcaggaagcaacgagagggtggcgcgcgaccgacgtgcgtacgtagcatgagcctgagtggagacgttggacgtgtatgtatatacctctctgcgtgttaactatgtacgtaagcggcaggcagtgcaataagtgtggctctgtagtatgtacgtgcgggtacgatgctgtaagctactgaggcaagtccataaataaataatgacacgtgcgtgttctataatctcttcgcttcttcatttgtccccttgcggagtttggcatccattgatgccgttacgctgagaacagacacagcagacgaaccaaaagtgagttcttgtatgaaactatgacccttcatcgctaggctcaaacagcaccccgtacgaacacagcaaattagtcatctaactattagcccctacatgtttcagacgatacataaatatagcccatccttagcaattagctattggccctgcccatcccaagcaatgatctcgaagtatttttaatatatagtatttttaatatgtagcttttaaaattagaagataattttgagacaaaaatctccaagtatttttttgggtattttttactgcctccgtttttctttatttctcgtcacctagtttaattttgtgctaatcggctataaacgaaacagagagaaaagttactctaaaagcaactccaacagattagatataaatcttatatcctgcctagagctgttaaaaagatagacaactttagtggattagtgtatgcaacaaactctccaaatttaagtatcccaactacccaacgcatatcgttcccttttcattggcgcacgaactttcacctgctatagccgacgtacatgttcgttttttttgggcggcgcttactttcttccccgttcgttctcagcatcgcaactcaatttgttatggcggagaagcccttgtatcccaggtagtaatgcacagatatgcattattattattcataaaatcgagctagttaccctatgaggtgacatgaagcgctcacggttactatgacggttagcttcacgactgttggtggcagtagcgtacgacttagctatagttccggacttacctaactgactagagtcacacttagctgaccctagtcacttaataacttcgtatagcatacattatacgaagttatggcgcgccaagcttggatctcctgcaggatctggccggccggatgggcggatctcgtacctcaactttgtatagaaaagttgggccagaatggcccggaccgggttaccaagcggccgcggaattcatcaggatattcttgtttaagatgttgaactctatggaggtttgtatgaactgatgatctaggaccggataagttcccttcttcatagcgaacttattcaaagaatgttttgtgtatcattcttgttacattgttattaatgaaaaaatattattggtcattggactgaacacgagtgttaaatatggaccaggccccaaataagatccattgatatatgaattaaataacaagaataaatcgagtcaccaaaccacttgccttttttaacgagacttgttcaccaacttgatacaaaagtcattatcctatgcaaatcaataatcatacaaaaatatccaataacactaaaaaattaaaagaaatggataatttcacaatatgttatacgataaagaagttacttttccaagaaattcactgattttataagcccacttgcattagataaatggcaaaaaaaaacaaaaaggaaaagaaataaagcacgaagaattctagaaaatacgaaatacgcttcaatgcagtgggacccacggttcaattattgccaattttcagctccaccgtatatttaaaaaataaaacgataatgctaaaaaaatataaatcgtaacgatcgttaaatctcaacggctggatcttatgacgaccgttagaaattgtggttgtcgacgagtcagtaataaacggcgtcaaagtggttgcagccggcacacacgagtcgtgtttatcaactcaaagcacaaatacttttcctcaacctaaaaataaggcaattagccaaaaacaactttgcgtgtaaacaacgctcaatacacgtgtcattttattattagctattgcttcaccgccttagctttctcgtgacctagtcgtcctcgtcttttcttcttcttcttctataaaacaatacccaaagagctcttcttcttcacaattcagatttcaatttctcaaaatcttaaaaactttctctcaattctctctaccgtgatcaaggtaaatttctgtgttccttattctctcaaaatcttcgattttgttttcgttcgatcccaatttcgtatatgttctttggtttagattctgttaatcttagatcgaagacgattttctgggtttgatcgttagatatcatcttaattctcgattagggtttcatagatatcatccgatttgttcaaataatttgagttttgtcgaataattactcttcgatttgtgatttctatctagatctggtgttagtttctagtttgtgcgatcgaatttgtcgattaatctgagtttttctgattaacagcggccgggatccccatggaacctcaccaacaacaaccaaatgaggataataacggtggcgccaaagggaactttctttgcaggcaaaccagtacaaggtggaatcccactactgaccagataagaatattgaaggaactgtactacatcaaaggtgttaggtccccaaatggagctgagattcagcagatctctgctaggcttagaaagtacggcaagattgaaggcaagaatgtattttattggtttcagaaccataaagctcgtgagaggcaaaagaaaagactcaccaatgaagtccccatgcaacaaagaactgcctggaaacctgaagattattactcttacaagtactccaacagtaataataatcctgggttttcttcggcttcttcatctgcaaataccggtgtggttactgttgggcagacagatagtcatggatatggatcggtaaccatgcaggagaagaattcttgggactgttcagcaccagctggtggtagcaatggtgctggtagtggatccatgagcaatattaactatggatcaggggttgacattaactctcacagttcatcctatgctgtatttggtcaagaacaagaagcagctgcaaagattgagactcttcctctatttccaatgcttggtgaggacatcagtagctctttcaacatcaacaatatcaacccagacttttattacagtagcggctgtggctatggtgattatggcaatgacacttcttcccgtacttccctggaccttagtctctactcctacaatggccaaccacaagattattaggtacctgacatcttatagtctgcaacctctcgtgtctgaattcctatctttatcaagtgttattgcttccacgactataggacagctttcgtcgaaaggttttgctcatgtgatctcgaaggattcatctagtctgatttttcgtgacttgtatcggttttattggattcatccaacatatatcaataaaaaatgagttgtgtttcctttcttcctagttcagttaaaattatttccctcctgcgcttgtgctgtaattgtctgtgtacctgttgtttgtgactgtgttagttcccttggatatgatttcgtatttgatatgtacatggagatagcttagcttcattattggagtatgaagttagtatgacatagtcactctcctggaaaattgacactgcaaaccatatttttattctgaaccacaaatcctagtcagtccgctggcatatgccgtccgtttgctgaatccagaacgtgggtttggagatgtacggctgagatgcctctatgcgaaggggatttcgtggtgaaacgagatgggagtagagcaacgcccgtggaagatgcttcaaacttccacacttttgagcaacgatcggcagtagtaaggtagacgatttcaagatcaaagcatatgaagataaacaacatcaacaacaaaatttgttggggttctatagagagaaacagagctacatacatacactgttttgtatctaccatctgagatgatgaaaagatgaaaaactaaagaatgccccggcgccaacgccaggacacgccgcgcgcgcgtcacccgagccatctcttgacccagccggcgctgtatatttacacacgttgcagcatcgatcaccacctgttcgatcgcgtcgccgtcaccaagcttggcgcgccggtcacccggtccgggcctagaaggccacccggggctcggcgttaggcttttagtccgctaggtggctagaccgaggttaggacgctagttcactaggggcctagtggtgttttaaggatgggcaagtttgtacaaaaaagcaggctccggccagaatggcccggaccgggttaccgaattcgagctcggtaccctgggatccgatatcttattagtgtttgtgcaaattcgactctacttgagttaggtagacagattcatggattgagtattaagtctagctttgattcttctagctttgtgggaagttctttagtctcgttgtattcaaagtgtggtgttcctgaaggagcttatcaagtttttaacgaggtgcctgtgaagaatctcgggatttggaacgctatgctcaaggcgtatgcgcaacattcacatactcaaaaggttattgaattgttcaaaaggatgaagctttctggaatgaaaccaaatttcataacttttttgaatgtgctcaatgcttgtagtcacgcgggtctagttgatgaagggagatactactttgatcagatgaaagaatcgaggattgagccgacggataagcattacgcttccttggtggatatgttaggacgagctggtagattacaagaagcacttgaagttatcactaatatgccgattgatcccacggaatctgtatggggagctttattaacgagttgtacagtccacaagaacacagagcttgcagcatttgcagcagacaaggtcttcgaattaggaccagtgagttccggtatgcacatttcgttatccaatgcttatgcagccgatggtagattcgaagacgcagctaaagctagaaaattgcttcgagaccgaggggaaaagaaggaaacagggctaagttgggttgaagaaaggaacaaggttcatacatttgcagctggagaaagacgtcatgagaaaagcaaggagatatatgagaagctggctgagttaggggaagagatggagaaagcgggttacattgcagacacaagctatgttctgagagaagtggatggtgacgagaagaatcaaaccataaggtatcatagtgagagattagctattgcttttggactgatcacgtttccagctgatagaccgatccgagtaatgaagaatctgcgtgtttgcggtgattgccataacgcgatcaagttcatgtccgtatgtacgagacgagtgatcattgtgagagataataatcggtttcatcggtttgaagatggcaagtgttcttgtaatgactattggtgaagaagacaaatgagagttggtttatatttaaccataatttcattcagttcacactgaaccggcgaaatttctttgccagacctattcggaattgaaacaagtggagtctcgaaacgaaaagaactttctggaattcgtttgctcacaaagctaaaaacggttgatttcatcgaaatacggcgtcgttttcaaagaacaatccagaaatcactggttttcctttatttcaaaagaagagactagaactttatttctcctctataaaatcactttgttttttcctctcttcttcataaatcaacaaaacaatcacaaatctctcgaaacgctctcgaagttccaaattttctcttagcattctctttcgtttctcgtttgcgttgaatcaaagttcgttgcgggatccaccatgtccaacctgctcacggttcaccagaaccttccggctcttccagtggacgcgacgtccgatgaagtcaggaagaacctcatggacatgttccgcgacaggcaagcgttcagcgagcacacctggaagatgctgctctccgtctgccgctcctgggctgcatggtgcaagctgaacaacaggaagtggttccccgctgagcccgaggacgtgagggattaccttctgtacctgcaagcgcgaggtttgtttctgcttctacctttgatatatatataataattatcattaattagtagtaatataatatttcaaatatttttttcaaaataaaagaatgtagtatatagcaattgcttttctgtagtttataagtgtgtatattttaatttataacttttctaatatatgaccaaaacatggtgatgcctaggtctggcagtgaagaccatccagcaacaccttggacaactgaacatgcttcacaggcgctccggcctcccgcgccccagcgactcgaacgccgtgagcctcgtcatgcgccgcatcaggaaggaaaacgtcgatgccggcgaaagggcaaagcaggccctcgcgttcgagaggaccgatttcgaccaggtccgcagcctgatggagaacagcgacaggtgccaggacattaggaacctggcgttcctcggaattgcatacaacacgctcctcaggatcgcggaaattgcccgcattcgcgtgaaggacattagccgcaccgacggcggcaggatgcttatccacattggcaggaccaagacgctcgtttccaccgcaggcgtcgaaaaggccctcagcctcggagtgaccaagctcgtcgaacgctggatctccgtgtccggcgtcgcggacgacccaaacaactacctcttctgccgcgtccgcaagaacggggtggctgcccctagcgccaccagccaactcagcacgagggccttggaaggtattttcgaggccacccaccgcctgatctacggcgcgaaggatgacagcggtcaacgctacctcgcatggtccgggcactccgcccgcgttggagctgctagggacatggcccgcgccggtgtttccatccccgaaatcatgcaggcgggtggatggacgaacgtgaacattgtcatgaactacattcgcaaccttgacagcgagacgggcgcaatggttcgcctcctggaagatggtgactgaggtaccgttaacagatctactaactatctatactgtaataatgttgtatagccgccggatagctagctagtttagtcattcagcggcgatgggtaataataaagtgtcatccatccatcaccatgcgtggcaacgtgagcaatgacctgattgaacaaattgaaatgaaaagaagaaatatgttatatgtcaacgagatttcctcataatgccactgacgacgtgtgtccaagaaatgtatcagtgatacgtatattcacaatttttttatgacttatactcacaatttgtttttttactacttatactcacaatttgttgtgcgtaccataacaatttcgatcgaatatatatcagaaagttgacgaaagtaagctcactcaaaaagttaaatgggctgcggaagctgcgtcaggcccaagttttggctattctatccggtatccacgattttgatggctgagggacatatgttcgcttaagcttcggtccgggcctagaaggccgatctcccgggcaactttattatacaaagttgatcacgtgagagtctaaaaacggcccctaactaacgcttagttgcccgctagattagtcccccgttagtgcctagttagacacacgacgaactaggggctataaggatttaaatatggtacggatccgtcgacggcgcgccgcggacctgaattccagcacactggcggccgttaataacttcgtatagcatacattatacgaagttatagtggcatcacgtttctagttctagacccatcagctgaggtacaaattacggccagaatggccatctggattcagcagggggtgattgcggttacatcatgtacggaaaaataattctaatccttgatttaaatttgaacttgactatttatttattctttatttcattttgtaaatcattttatgtatctcctggcaagcaattttatccaccttgcaccaacaccttcgggttccataatcaaaccaccttaacttcacaccatgctgtaactcacaccgcccagcatctccaatgtgaaagaagctaaaatttaataaacaatcatacgaagcagtgacaaaataccagatggtattaatgcttcgataaaattaattggaaagtataaaatggtagaaaataataaattataattaatttaagtaagataaaaaataattaaaaactaaaatgttaaaattttaaaaaaattattttaaataatatttaaaaacattaaaaatcattttaaaaaatttatttatagaacaattaaataaatatttcagctaataaaaaacaaaagcttacctagccttagaagacaacttgtccaacaattagatgatacccattgcccttacgttttctttaacatcaattattgtttttgtcaacaagctatcttttagttttattttattggtaaaaaatatgtcgccttcaagttgcatcatttaacacatctcgtcattagaaaaataaaactcttccctaaacgattagtagaaaaaatcattcgataataaataagaaagaaaaattagaaaaaaataacttcattttaaaaaaatcattaaggctatattttttaaatgactaattttatatagactgtaactaaaagtatacaatttattatgctatgtatcttaaagaattacttataaaaatctacggaagaatatcttacaaagtgaaaaacaaatgagaaagaatttagtgggatgattatgattttatttgaaaattgaaaaaataattattaaagactttagtggagtaagaaagctttcctattagtcttttcttatccataaaaaaaaaaaaaaaaatctagcgtgacagcttttccatagattttaataatgtaaaatactggtagcagccgaccgttcaggtaatggacactgtggtcctaacttgcaacgggtgcgggcccaatttaataacgccgtggtaacggataaagccaagcgtgaagcggtgaaggtacatctctgactccgtcaagattacgaaaccgtcaactacgaaggactccccgaaatatcatctgtgtcataaacaccaagtcacaccatacatgggcacgcgtcacaatatgattggagaacggttccaccgcatatgctataaaatgcccccacacccctcgaccctaatcgcacttcaattgcaatcaaattagttcattctctttgcgcagttccctacctctcctttcaaggttcgtagatttcttccgtttttttttcttcttctttattgtttgttctacatcagcatgatgttgatttgattgtgttttctatcgtttcatcgattataaattttcataatcagaagattcagcttttattaatgcaagaacgtccttaattgatgattttataaccgtaaattaggtctaattagagtttttttcataaagattttcagatccgtttacaacaagccttaattgttgattctgtagtcgtagattaaggtttttttcatgaactacttcagatccgttaaacaacagccttatttgttgatacttcagtcgtttttcaagaaattgttcagatccgttgataaaagccttattcgttgattctgtatggtatttcaagagatattgctcaggtcctttagcaactaccttatttgttgattctgtggccatagattaggattttttttcacgaaattgcttcttgaaattacgtgatggattttgattctgatttatcttgtgattgttgactctacagccatggctgcaactactcttacatctgctttacctggtgctttcagttcatcccagagaccaagtgctcctttcaacttacaaagatcacctagagtgcttagaaggttcaacagaaagacaggacgtcaacctcgtggacttgttcgtgctgcaaaggctcaagcggcgcaaaacctgccagagaaattcgatgaaacaagactctgggaggccctcaggggatttggggttagtccaagtagggttacttacgctcccgtcggattcggagattaccactggaccgtcacagatgaagacgggagaccttggttcgcaactgtcagtgacctcgaacacaaagagcattgcgggcagggagcacaagcagcccttaaaggactcagacaagctatggacactgccctcgcacttagagatagggacggactcagattcgtggttgctccagtggcagcaacagatgggggtggccctgtccttccccttgacgctaggtatgcactcacagtcttccctcacgtcccaggaagaacaggagagttcggacaaagactcacagaggcagagagggacagactgcttgctcttctggcagaactccacggaagaacacctcctgaaacaaccccaccagccgatatggaaccaccaggacttcctggtgttagagcagcactcgccgaaagtgaaggaccttggagtggaggaccatttgcagaacccgctagacttcttctcagagaacacgaggccacactgcacgcaagactcgctgaattcgaagccctcgtcgcaagagttaagggtcgtggagcacctcttgtcgttacccacggagaaccacacccaggcaacttgatcctcggagaggaaggctatctcctcgtggactgggatacagttggactggctccagctgaaagggatttgagtctcatctcagacgacccagctgacctcgcaagatacgcagagcttacaggaagaactccagacccagacgcactcgcactctatagactgcgttggagtctccttgatgtggctgagttcgtcgagtggttcagggctgaacaccaaagaacccaagacaccgagagtgcatggaaggggttcactgacacacttgggcaattggctgctggtggatcagctgcatagcaaacttatctctgttatgaatcagaagaagttcatgtctcgtttcatttaaaactttggtggtttgtgttttggggccttgtaaagcccctgatgaataattgttcaactatgtttccgttcctgtgttatacctttctttctaatgagtaatgacatcaaacttcttctgtattgaaattatgtccttgtgagtctctttatcatcgtttcgtctttacattatatgtgctacttttgtctaatgagcctgaaaagtggctccaatggtacgcactggaagatttgttggcttctggtagatatagcgacagtgttgagcttgtaatatcatgtctcttattgctaaattagttcctttcttaacagaaaccttcaaagtttttgtttttgttttcatttacctaatgtacacatacgctggccatgactaacaacatgtccaggcttagagcatatttttttctagcttaaattgttaacttgtcattcagtaaaatccgagaattgtgaagctctaattgaagctaattcgttttataaagtcagttaaaaagtatactaaattatccaacttttcttcaaaatctcaaaattctatgacaaaacgatagtctttgtttatgtcagtaccacaaagaggtggaaaaaaacaccaaaaaaacaataagcaaactatacactgagaagaaaaataaaagagagctcaatagatgttttatactaacggtagattagatcaaagatccaagctttactctacatagagcagaacccagaatcccttcatatctcttttattctagcaccgataatctactgaaaagaagacacttagagctctgtctctttgtcaaagaagtcccagccgtcatccagaagctccttacgttcattaacagaggccgcaattggatcgggtttacttattttgtgggtatctatacttttattagatttttaatcaggctcctgatttctttttatttcgattgaattcctgaacttgtattattcagtagatcgaataaattataaaaagataaaatcataaaataatattttatcctatcaatcatattaaagcaatgaatatgtaaaattaatcttatctttattttaaaaaatcatataggtttagtatttttttaaaaataaagataggattagttttactattcactgcttattacttttaaaaaaatcataaaggtttagtatttttttaaaataaatataggaatagttttactattcactgctttaatagaaaaatagtttaaaatttaagatagttttaatcccagcatttgccacgtttgaacgtgagccgaaacgatgtcgttacattatcttaacctagctgaaacgatgtcgtcataatatcgccaaatgccaactggactacgtcgaacccacaaatcccacaaagcgcgtgaaatcaaatcgctcaaaccacaaaaaagaacaacgcgtttgttacacgctcaatcccacgcgagtagagcacagtaaccttcaaataagcgaatggggcataatcagaaatccgaaataaacctaggggcattatcggaaatgaaaagtagctcactcaatataaaaatctaggaaccctagttttcgttatcactctgtgctccctcgctctatttctcagtctctgtgtttgcggctgaggattccgaacgagtgaccttcttcgtttctcgcaaaggtaacagcctctgctcttgtctcttcgattcgatctatgcctgtctcttatttacgatgatgtttcttcggttatgtttttttatttatgctttatgctgttgatgttcggttgtttgtttcgctttgtttttgtggttcagttttttaggattcttttggtttttgaatcgattaatcggaagagattttcgagttatttggtgtgttggaggtgaatcttttttttgaggtcatagatctgttgtatttgtgttataaacatgcgactttgtatgattttttacgaggttatgatgttctggttgttttattatgaatctgttgagacagaaccatgatttttgttgatgttcgtttacactattaaaggtttgttttaacaggattaaaagttttttaagcatgttgaaggagtcttgtagatatgtaaccgtcgatagtttttttgtgggtttgttcacatgttatcaagcttaatcttttactatgtatgcgaccatatctggatccagcaaaggcgattttttaattccttgtgaaacttttgtaatatgaagttgaaattttgttattggtaaactataaatgtgtgaagttggagtatacctttaccttcttatttggctttgtgatagtttaatttatatgtattttgagttctgacttgtatttctttgaattgattctagtttaagtaatcatggcctcctccgagaacgtcatcaccgagttcatgcgcttcaaggtgcgcatggagggcaccgtgaacggccacgagttcgagatcgagggcgagggcgagggccgcccctacgagggccacaacaccgtgaagctgaaggtgacgaagggcggccccctgcccttcgcctgggacatcctgtccccccagttccagtacggctccaaggtgtacgtgaagcaccccgccgacatccccgactacaagaagctgtccttccccgagggcttcaagtgggagcgcgtgatgaacttcgaggacggcggcgtggcgaccgtgacccaggactcctccctgcaggacggctgcttcatctacaaggtgaagttcatcggcgtgaacttcccctccgacggccccgtgatgcagaagaagaccatgggctgggaggcctccaccgagcgcctgtacccccgcgacggcgtgctgaagggcgagacccacaaggccctgaagctgaaggacggcggccactacctggtggagttcaagtccatctacatggccaagaagcccgtgcagctgcccggctactactacgtggacgccaagctggacatcacctcccacaacgaggactacaccatcgtggagcagtacgagcgcaccgagggccgccaccacctgttcctgtagttttgtgatctgatgataagtggttggttcgtgtctcatgcacttgggaggtgatctatttcacctggtgtagtttgtgtttccgtcagttggaaaaacttatccctatcgatttcgttttcattttctgcttttcttttatgtaccttcgtttgggcttgtaacgggcctttgtatttcaactctcaataataatccaagtgcatgttaaacaatttgtcatctgtttcggctttgatatactactggtgaagatgggccgtactactgcatcacaacgaaaaataataataagatgaaaaacttgaagtggaaaaaaaaaaaaacttgaatgttcactactactcattgaccataatgtttaacatacatagctcaatagtatttttgtgaatatggcaacacaaacagtccaaaacaattgtctcttactataccaaaccaagggcgccgcttgtttgccactctttgtgtgcaatagtgtgattaccacatctccacattcaatatattccctgaattatctgacgattttgatggctcactgttttcccaagtcttgaattgtcttctgtgcgccagtcaaatgcatatgtgttgagtttatcttttaaatatcaagcttttgtttttaacttttgtttgtaaccaaaaactcacagtaggagtttgatcacataattttatgtttgcctttgcaatttctagtgagtctttgattaaaagcttgaaaagaaaatgcagccaagcttaccaagtaagttatgtgtattaaccagaggaagagagaatcttgcaaaatttcaacaaacacaaaaagaagtattactacgattggtggagaaagaaaacgattccaaatcttgaactgttgttgtaaaagcatagcagaaagtgggagacaaccgaaatagaaatgactataacttaatttaatgttatcattataatttcttctagcaaatatttagaaagtaaatatcacatcaacctttaatgtaattaagctttctctttttgattcatgtgagatgaaaagaaaaaaaagaagagaaaagtgtagaaaacacatcatttctaagctgaagctgaggtacaaattaattaataagtgactagggtcacgtgaccctagtcacttatgattccgatgacttcgtaggttcctagctcaagccgctcgtgtccaagcgtcacttacgattagctaatgattacggcatctaggaccgactagttcttatgtgcttctagtctccaaatgtggttgatagttattttgctctaagatcaacagtaatgaagtataaatcatcgttgtggtgtgctactcggttaattgagcattaacacacacaaacatgacgaggatggtataatctccaaaaatgtgtactttgttaggtgggaccctatagccttgattaatgtgctatgttaggcatgcctggaaacgtgtgacgcatatgttttgtgaacctgttgatattatatgtgcttttatattaccatattttattaaaatactaatatttattactagtaagatataacattctatctagcttaaaaactaaccataaatattccataataactagatttaccaaactaatatactaaatatacataataaatacaaaattaacaagacaataatcaatatttatgagcttaatatatttagacattatggttggtcgacgataatcatgctaacttttcgtaattgcttgattgaaatatgcttagaataatgcctctttgttctacatggcaaatagggaccattatggtgtaacaccctgggaaccacaaacaccccgaaatgctactaaactacacaactaaccttcatatataaaatttcgacagcatctcctttgaaaatttgcatagacgtggaagcaacagagtataaacagatctagctagctaagtttaaacggccggccaaacgtgcaagcgctactagacaattcagtacattaaaaacgtccgcaatgtgttattaagttgtctaagcgtcaatttatttacaattgaatatatcctgcca

SEQ ID NO: 194 - DNA, 16503 bp, Artificial Sequence
  RV029480 T-DNA
aattacaacggtatatatcctgtcagccaacaccaaaacatcaaaaaaatcgggatcaggatcaggatctgcggccgcatcctgcaggtttaaacggccggccttcactagctagctgctaagctcaaacgagcaggaagcaacgagagggtggcgcgcgaccgacgtgcgtacgtagcatgagcctgagtggagacgttggacgtgtatgtatatacctctctgcgtgttaactatgtacgtaagcggcaggcagtgcaataagtgtggctctgtagtatgtacgtgcgggtacgatgctgtaagctactgaggcaagtccataaataaataatgacacgtgcgtgttctataatctcttcgcttcttcatttgtccccttgcggagtttggcatccattgatgccgttacgctgagaacagacacagcagacgaaccaaaagtgagttcttgtatgaaactatgacccttcatcgctaggctcaaacagcaccccgtacgaacacagcaaattagtcatctaactattagcccctacatgtttcagacgatacataaatatagcccatccttagcaattagctattggccctgcccatcccaagcaatgatctcgaagtatttttaatatatagtatttttaatatgtagcttttaaaattagaagataattttgagacaaaaatctccaagtatttttttgggtattttttactgcctccgtttttctttatttctcgtcacctagtttaattttgtgctaatcggctataaacgaaacagagagaaaagttactctaaaagcaactccaacagattagatataaatcttatatcctgcctagagctgttaaaaagatagacaactttagtggattagtgtatgcaacaaactctccaaatttaagtatcccaactacccaacgcatatcgttcccttttcattggcgcacgaactttcacctgctatagccgacgtacatgttcgttttttttgggcggcgcttactttcttccccgttcgttctcagcatcgcaactcaatttgttatggcggagaagcccttgtatcccaggtagtaatgcacagatatgcattattattattcataaaatcgagctagttaccctatgaggtgacatgaagcgctcacggttactatgacggttagcttcacgactgttggtggcagtagcgtacgacttagctatagttccggacttacctaactgactagagtcacacttagctgaccctagtcacttaataacttcgtatagcatacattatacgaagttatggcgcgccaagcttggatctcctgcaggatctggccggccggatgggcggatctcgtacctcaactttgtatagaaaagttgggccagaatggcccggaccgggttaccaagcggccgcggaattcatcaggatattcttgtttaagatgttgaactctatggaggtttgtatgaactgatgatctaggaccggataagttcccttcttcatagcgaacttattcaaagaatgttttgtgtatcattcttgttacattgttattaatgaaaaaatattattggtcattggactgaacacgagtgttaaatatggaccaggccccaaataagatccattgatatatgaattaaataacaagaataaatcgagtcaccaaaccacttgccttttttaacgagacttgttcaccaacttgatacaaaagtcattatcctatgcaaatcaataatcatacaaaaatatccaataacactaaaaaattaaaagaaatggataatttcacaatatgttatacgataaagaagttacttttccaagaaattcactgattttataagcccacttgcattagataaatggcaaaaaaaaacaaaaaggaaaagaaataaagcacgaagaattctagaaaatacgaaatacgcttcaatgcagtgggacccacggttcaattattgccaattttcagctccaccgtatatttaaaaaataaaacgataatgctaaaaaaatataaatcgtaacgatcgttaaatctcaacggctggatcttatgacgaccgttagaaattgtggttgtcgacgagtcagtaataaacggcgtcaaagtggttgcagccggcacacacgagtcgtgtttatcaactcaaagcacaaatacttttcctcaacctaaaaataaggcaattagccaaaaacaactttgcgtgtaaacaacgctcaatacacgtgtcattttattattagctattgcttcaccgccttagctttctcgtgacctagtcgtcctcgtcttttcttcttcttcttctataaaacaatacccaaagagctcttcttcttcacaattcagatttcaatttctcaaaatcttaaaaactttctctcaattctctctaccgtgatcaaggtaaatttctgtgttccttattctctcaaaatcttcgattttgttttcgttcgatcccaatttcgtatatgttctttggtttagattctgttaatcttagatcgaagacgattttctgggtttgatcgttagatatcatcttaattctcgattagggtttcatagatatcatccgatttgttcaaataatttgagttttgtcgaataattactcttcgatttgtgatttctatctagatctggtgttagtttctagtttgtgcgatcgaatttgtcgattaatctgagtttttctgattaacagcggccgggatccccatggctcctaaaaagaagaggaaagttatggaacctcaccaacaacaaccaaatgaggataataacggtggcgccaaagggaactttctttgcaggcaaaccagtacaaggtggaatcccactactgaccagataagaatattgaaggaactgtactacatcaaaggtgttaggtccccaaatggagctgagattcagcagatctctgctaggcttagaaagtacggcaagattgaaggcaagaatgtattttattggtttcagaaccataaagctcgtgagaggcaaaagaaaagactcaccaatgaagtccccatgcaacaaagaactgcctggaaacctgaagattattactcttacaagtactccaacagtaataataatcctgggttttcttcggcttcttcatctgcaaataccggtgtggttactgttgggcagacagatagtcatggatatggatcggtaaccatgcaggagaagaattcttgggactgttcagcaccagctggtggtagcaatggtgctggtagtggatccatgagcaatattaactatggatcaggggttgacattaactctcacagttcatcctatgctgtatttggtcaagaacaagaagcagctgcaaagattgagactcttcctctatttccaatgcttggtgaggacatcagtagctctttcaacatcaacaatatcaacccagacttttattacagtagcggctgtggctatggtgattatggcaatgacacttcttcccgtacttccctggaccttagtctctactcctacaatggccaaccacaagattattaggtacctgacatcttatagtctgcaacctctcgtgtctgaattcctatctttatcaagtgttattgcttccacgactataggacagctttcgtcgaaaggttttgctcatgtgatctcgaaggattcatctagtctgatttttcgtgacttgtatcggttttattggattcatccaacatatatcaataaaaaatgagttgtgtttcctttcttcctagttcagttaaaattatttccctcctgcgcttgtgctgtaattgtctgtgtacctgttgtttgtgactgtgttagttcccttggatatgatttcgtatttgatatgtacatggagatagcttagcttcattattggagtatgaagttagtatgacatagtcactctcctggaaaattgacactgcaaaccatatttttattctgaaccacaaatcctagtcagtccgctggcatatgccgtccgtttgctgaatccagaacgtgggtttggagatgtacggctgagatgcctctatgcgaaggggatttcgtggtgaaacgagatgggagtagagcaacgcccgtggaagatgcttcaaacttccacacttttgagcaacgatcggcagtagtaaggtagacgatttcaagatcaaagcatatgaagataaacaacatcaacaacaaaatttgttggggttctatagagagaaacagagctacatacatacactgttttgtatctaccatctgagatgatgaaaagatgaaaaactaaagaatgccccggcgccaacgccaggacacgccgcgcgcgcgtcacccgagccatctcttgacccagccggcgctgtatatttacacacgttgcagcatcgatcaccacctgttcgatcgcgtcgccgtcaccaagcttggcgcgccggtcacccggtccgggcctagaaggccacccggggctcggcgttaggcttttagtccgctaggtggctagaccgaggttaggacgctagttcactaggggcctagtggtgttttaaggatgggcaagtttgtacaaaaaagcaggctccggccagaatggcccggaccgggttaccgaattcgagctcggtaccctgggatccgatatcttattagtgtttgtgcaaattcgactctacttgagttaggtagacagattcatggattgagtattaagtctagctttgattcttctagctttgtgggaagttctttagtctcgttgtattcaaagtgtggtgttcctgaaggagcttatcaagtttttaacgaggtgcctgtgaagaatctcgggatttggaacgctatgctcaaggcgtatgcgcaacattcacatactcaaaaggttattgaattgttcaaaaggatgaagctttctggaatgaaaccaaatttcataacttttttgaatgtgctcaatgcttgtagtcacgcgggtctagttgatgaagggagatactactttgatcagatgaaagaatcgaggattgagccgacggataagcattacgcttccttggtggatatgttaggacgagctggtagattacaagaagcacttgaagttatcactaatatgccgattgatcccacggaatctgtatggggagctttattaacgagttgtacagtccacaagaacacagagcttgcagcatttgcagcagacaaggtcttcgaattaggaccagtgagttccggtatgcacatttcgttatccaatgcttatgcagccgatggtagattcgaagacgcagctaaagctagaaaattgcttcgagaccgaggggaaaagaaggaaacagggctaagttgggttgaagaaaggaacaaggttcatacatttgcagctggagaaagacgtcatgagaaaagcaaggagatatatgagaagctggctgagttaggggaagagatggagaaagcgggttacattgcagacacaagctatgttctgagagaagtggatggtgacgagaagaatcaaaccataaggtatcatagtgagagattagctattgcttttggactgatcacgtttccagctgatagaccgatccgagtaatgaagaatctgcgtgtttgcggtgattgccataacgcgatcaagttcatgtccgtatgtacgagacgagtgatcattgtgagagataataatcggtttcatcggtttgaagatggcaagtgttcttgtaatgactattggtgaagaagacaaatgagagttggtttatatttaaccataatttcattcagttcacactgaaccggcgaaatttctttgccagacctattcggaattgaaacaagtggagtctcgaaacgaaaagaactttctggaattcgtttgctcacaaagctaaaaacggttgatttcatcgaaatacggcgtcgttttcaaagaacaatccagaaatcactggttttcctttatttcaaaagaagagactagaactttatttctcctctataaaatcactttgttttttcctctcttcttcataaatcaacaaaacaatcacaaatctctcgaaacgctctcgaagttccaaattttctcttagcattctctttcgtttctcgtttgcgttgaatcaaagttcgttgcgggatccaccatgtccaacctgctcacggttcaccagaaccttccggctcttccagtggacgcgacgtccgatgaagtcaggaagaacctcatggacatgttccgcgacaggcaagcgttcagcgagcacacctggaagatgctgctctccgtctgccgctcctgggctgcatggtgcaagctgaacaacaggaagtggttccccgctgagcccgaggacgtgagggattaccttctgtacctgcaagcgcgaggtttgtttctgcttctacctttgatatatatataataattatcattaattagtagtaatataatatttcaaatatttttttcaaaataaaagaatgtagtatatagcaattgcttttctgtagtttataagtgtgtatattttaatttataacttttctaatatatgaccaaaacatggtgatgcctaggtctggcagtgaagaccatccagcaacaccttggacaactgaacatgcttcacaggcgctccggcctcccgcgccccagcgactcgaacgccgtgagcctcgtcatgcgccgcatcaggaaggaaaacgtcgatgccggcgaaagggcaaagcaggccctcgcgttcgagaggaccgatttcgaccaggtccgcagcctgatggagaacagcgacaggtgccaggacattaggaacctggcgttcctcggaattgcatacaacacgctcctcaggatcgcggaaattgcccgcattcgcgtgaaggacattagccgcaccgacggcggcaggatgcttatccacattggcaggaccaagacgctcgtttccaccgcaggcgtcgaaaaggccctcagcctcggagtgaccaagctcgtcgaacgctggatctccgtgtccggcgtcgcggacgacccaaacaactacctcttctgccgcgtccgcaagaacggggtggctgcccctagcgccaccagccaactcagcacgagggccttggaaggtattttcgaggccacccaccgcctgatctacggcgcgaaggatgacagcggtcaacgctacctcgcatggtccgggcactccgcccgcgttggagctgctagggacatggcccgcgccggtgtttccatccccgaaatcatgcaggcgggtggatggacgaacgtgaacattgtcatgaactacattcgcaaccttgacagcgagacgggcgcaatggttcgcctcctggaagatggtgactgaggtaccgttaacagatctactaactatctatactgtaataatgttgtatagccgccggatagctagctagtttagtcattcagcggcgatgggtaataataaagtgtcatccatccatcaccatgcgtggcaacgtgagcaatgacctgattgaacaaattgaaatgaaaagaagaaatatgttatatgtcaacgagatttcctcataatgccactgacgacgtgtgtccaagaaatgtatcagtgatacgtatattcacaatttttttatgacttatactcacaatttgtttttttactacttatactcacaatttgttgtgcgtaccataacaatttcgatcgaatatatatcagaaagttgacgaaagtaagctcactcaaaaagttaaatgggctgcggaagctgcgtcaggcccaagttttggctattctatccggtatccacgattttgatggctgagggacatatgttcgcttaagcttcggtccgggcctagaaggccgatctcccgggcaactttattatacaaagttgatcacgtgagagtctaaaaacggcccctaactaacgcttagttgcccgctagattagtcccccgttagtgcctagttagacacacgacgaactaggggctataaggatttaaatatggtacggatccgtcgacggcgcgccgcggacctgaattccagcacactggcggccgttaataacttcgtatagcatacattatacgaagttatagtggcatcacgtttctagttctagacccatcagctgaggtacaaattacggccagaatggccatctggattcagcagggggtgattgcggttacatcatgtacggaaaaataattctaatccttgatttaaatttgaacttgactatttatttattctttatttcattttgtaaatcattttatgtatctcctggcaagcaattttatccaccttgcaccaacaccttcgggttccataatcaaaccaccttaacttcacaccatgctgtaactcacaccgcccagcatctccaatgtgaaagaagctaaaatttaataaacaatcatacgaagcagtgacaaaataccagatggtattaatgcttcgataaaattaattggaaagtataaaatggtagaaaataataaattataattaatttaagtaagataaaaaataattaaaaactaaaatgttaaaattttaaaaaaattattttaaataatatttaaaaacattaaaaatcattttaaaaaatttatttatagaacaattaaataaatatttcagctaataaaaaacaaaagcttacctagccttagaagacaacttgtccaacaattagatgatacccattgcccttacgttttctttaacatcaattattgtttttgtcaacaagctatcttttagttttattttattggtaaaaaatatgtcgccttcaagttgcatcatttaacacatctcgtcattagaaaaataaaactcttccctaaacgattagtagaaaaaatcattcgataataaataagaaagaaaaattagaaaaaaataacttcattttaaaaaaatcattaaggctatattttttaaatgactaattttatatagactgtaactaaaagtatacaatttattatgctatgtatcttaaagaattacttataaaaatctacggaagaatatcttacaaagtgaaaaacaaatgagaaagaatttagtgggatgattatgattttatttgaaaattgaaaaaataattattaaagactttagtggagtaagaaagctttcctattagtcttttcttatccataaaaaaaaaaaaaaaaatctagcgtgacagcttttccatagattttaataatgtaaaatactggtagcagccgaccgttcaggtaatggacactgtggtcctaacttgcaacgggtgcgggcccaatttaataacgccgtggtaacggataaagccaagcgtgaagcggtgaaggtacatctctgactccgtcaagattacgaaaccgtcaactacgaaggactccccgaaatatcatctgtgtcataaacaccaagtcacaccatacatgggcacgcgtcacaatatgattggagaacggttccaccgcatatgctataaaatgcccccacacccctcgaccctaatcgcacttcaattgcaatcaaattagttcattctctttgcgcagttccctacctctcctttcaaggttcgtagatttcttccgtttttttttcttcttctttattgtttgttctacatcagcatgatgttgatttgattgtgttttctatcgtttcatcgattataaattttcataatcagaagattcagcttttattaatgcaagaacgtccttaattgatgattttataaccgtaaattaggtctaattagagtttttttcataaagattttcagatccgtttacaacaagccttaattgttgattctgtagtcgtagattaaggtttttttcatgaactacttcagatccgttaaacaacagccttatttgttgatacttcagtcgtttttcaagaaattgttcagatccgttgataaaagccttattcgttgattctgtatggtatttcaagagatattgctcaggtcctttagcaactaccttatttgttgattctgtggccatagattaggattttttttcacgaaattgcttcttgaaattacgtgatggattttgattctgatttatcttgtgattgttgactctacagccatggctgcaactactcttacatctgctttacctggtgctttcagttcatcccagagaccaagtgctcctttcaacttacaaagatcacctagagtgcttagaaggttcaacagaaagacaggacgtcaacctcgtggacttgttcgtgctgcaaaggctcaagcggcgcaaaacctgccagagaaattcgatgaaacaagactctgggaggccctcaggggatttggggttagtccaagtagggttacttacgctcccgtcggattcggagattaccactggaccgtcacagatgaagacgggagaccttggttcgcaactgtcagtgacctcgaacacaaagagcattgcgggcagggagcacaagcagcccttaaaggactcagacaagctatggacactgccctcgcacttagagatagggacggactcagattcgtggttgctccagtggcagcaacagatgggggtggccctgtccttccccttgacgctaggtatgcactcacagtcttccctcacgtcccaggaagaacaggagagttcggacaaagactcacagaggcagagagggacagactgcttgctcttctggcagaactccacggaagaacacctcctgaaacaaccccaccagccgatatggaaccaccaggacttcctggtgttagagcagcactcgccgaaagtgaaggaccttggagtggaggaccatttgcagaacccgctagacttcttctcagagaacacgaggccacactgcacgcaagactcgctgaattcgaagccctcgtcgcaagagttaagggtcgtggagcacctcttgtcgttacccacggagaaccacacccaggcaacttgatcctcggagaggaaggctatctcctcgtggactgggatacagttggactggctccagctgaaagggatttgagtctcatctcagacgacccagctgacctcgcaagatacgcagagcttacaggaagaactccagacccagacgcactcgcactctatagactgcgttggagtctccttgatgtggctgagttcgtcgagtggttcagggctgaacaccaaagaacccaagacaccgagagtgcatggaaggggttcactgacacacttgggcaattggctgctggtggatcagctgcatagcaaacttatctctgttatgaatcagaagaagttcatgtctcgtttcatttaaaactttggtggtttgtgttttggggccttgtaaagcccctgatgaataattgttcaactatgtttccgttcctgtgttatacctttctttctaatgagtaatgacatcaaacttcttctgtattgaaattatgtccttgtgagtctctttatcatcgtttcgtctttacattatatgtgctacttttgtctaatgagcctgaaaagtggctccaatggtacgcactggaagatttgttggcttctggtagatatagcgacagtgttgagcttgtaatatcatgtctcttattgctaaattagttcctttcttaacagaaaccttcaaagtttttgtttttgttttcatttacctaatgtacacatacgctggccatgactaacaacatgtccaggcttagagcatatttttttctagcttaaattgttaacttgtcattcagtaaaatccgagaattgtgaagctctaattgaagctaattcgttttataaagtcagttaaaaagtatactaaattatccaacttttcttcaaaatctcaaaattctatgacaaaacgatagtctttgtttatgtcagtaccacaaagaggtggaaaaaaacaccaaaaaaacaataagcaaactatacactgagaagaaaaataaaagagagctcaatagatgttttatactaacggtagattagatcaaagatccaagctttactctacatagagcagaacccagaatcccttcatatctcttttattctagcaccgataatctactgaaaagaagacacttagagctctgtctctttgtcaaagaagtcccagccgtcatccagaagctccttacgttcattaacagaggccgcaattggatcgggtttacttattttgtgggtatctatacttttattagatttttaatcaggctcctgatttctttttatttcgattgaattcctgaacttgtattattcagtagatcgaataaattataaaaagataaaatcataaaataatattttatcctatcaatcatattaaagcaatgaatatgtaaaattaatcttatctttattttaaaaaatcatataggtttagtatttttttaaaaataaagataggattagttttactattcactgcttattacttttaaaaaaatcataaaggtttagtatttttttaaaataaatataggaatagttttactattcactgctttaatagaaaaatagtttaaaatttaagatagttttaatcccagcatttgccacgtttgaacgtgagccgaaacgatgtcgttacattatcttaacctagctgaaacgatgtcgtcataatatcgccaaatgccaactggactacgtcgaacccacaaatcccacaaagcgcgtgaaatcaaatcgctcaaaccacaaaaaagaacaacgcgtttgttacacgctcaatcccacgcgagtagagcacagtaaccttcaaataagcgaatggggcataatcagaaatccgaaataaacctaggggcattatcggaaatgaaaagtagctcactcaatataaaaatctaggaaccctagttttcgttatcactctgtgctccctcgctctatttctcagtctctgtgtttgcggctgaggattccgaacgagtgaccttcttcgtttctcgcaaaggtaacagcctctgctcttgtctcttcgattcgatctatgcctgtctcttatttacgatgatgtttcttcggttatgtttttttatttatgctttatgctgttgatgttcggttgtttgtttcgctttgtttttgtggttcagttttttaggattcttttggtttttgaatcgattaatcggaagagattttcgagttatttggtgtgttggaggtgaatcttttttttgaggtcatagatctgttgtatttgtgttataaacatgcgactttgtatgattttttacgaggttatgatgttctggttgttttattatgaatctgttgagacagaaccatgatttttgttgatgttcgtttacactattaaaggtttgttttaacaggattaaaagttttttaagcatgttgaaggagtcttgtagatatgtaaccgtcgatagtttttttgtgggtttgttcacatgttatcaagcttaatcttttactatgtatgcgaccatatctggatccagcaaaggcgattttttaattccttgtgaaacttttgtaatatgaagttgaaattttgttattggtaaactataaatgtgtgaagttggagtatacctttaccttcttatttggctttgtgatagtttaatttatatgtattttgagttctgacttgtatttctttgaattgattctagtttaagtaatcatggcctcctccgagaacgtcatcaccgagttcatgcgcttcaaggtgcgcatggagggcaccgtgaacggccacgagttcgagatcgagggcgagggcgagggccgcccctacgagggccacaacaccgtgaagctgaaggtgacgaagggcggccccctgcccttcgcctgggacatcctgtccccccagttccagtacggctccaaggtgtacgtgaagcaccccgccgacatccccgactacaagaagctgtccttccccgagggcttcaagtgggagcgcgtgatgaacttcgaggacggcggcgtggcgaccgtgacccaggactcctccctgcaggacggctgcttcatctacaaggtgaagttcatcggcgtgaacttcccctccgacggccccgtgatgcagaagaagaccatgggctgggaggcctccaccgagcgcctgtacccccgcgacggcgtgctgaagggcgagacccacaaggccctgaagctgaaggacggcggccactacctggtggagttcaagtccatctacatggccaagaagcccgtgcagctgcccggctactactacgtggacgccaagctggacatcacctcccacaacgaggactacaccatcgtggagcagtacgagcgcaccgagggccgccaccacctgttcctgtagttttgtgatctgatgataagtggttggttcgtgtctcatgcacttgggaggtgatctatttcacctggtgtagtttgtgtttccgtcagttggaaaaacttatccctatcgatttcgttttcattttctgcttttcttttatgtaccttcgtttgggcttgtaacgggcctttgtatttcaactctcaataataatccaagtgcatgttaaacaatttgtcatctgtttcggctttgatatactactggtgaagatgggccgtactactgcatcacaacgaaaaataataataagatgaaaaacttgaagtggaaaaaaaaaaaaacttgaatgttcactactactcattgaccataatgtttaacatacatagctcaatagtatttttgtgaatatggcaacacaaacagtccaaaacaattgtctcttactataccaaaccaagggcgccgcttgtttgccactctttgtgtgcaatagtgtgattaccacatctccacattcaatatattccctgaattatctgacgattttgatggctcactgttttcccaagtcttgaattgtcttctgtgcgccagtcaaatgcatatgtgttgagtttatcttttaaatatcaagcttttgtttttaacttttgtttgtaaccaaaaactcacagtaggagtttgatcacataattttatgtttgcctttgcaatttctagtgagtctttgattaaaagcttgaaaagaaaatgcagccaagcttaccaagtaagttatgtgtattaaccagaggaagagagaatcttgcaaaatttcaacaaacacaaaaagaagtattactacgattggtggagaaagaaaacgattccaaatcttgaactgttgttgtaaaagcatagcagaaagtgggagacaaccgaaatagaaatgactataacttaatttaatgttatcattataatttcttctagcaaatatttagaaagtaaatatcacatcaacctttaatgtaattaagctttctctttttgattcatgtgagatgaaaagaaaaaaaagaagagaaaagtgtagaaaacacatcatttctaagctgaagctgaggtacaaattaattaataagtgactagggtcacgtgaccctagtcacttatgattccgatgacttcgtaggttcctagctcaagccgctcgtgtccaagcgtcacttacgattagctaatgattacggcatctaggaccgactagttcttatgtgcttctagtctccaaatgtggttgatagttattttgctctaagatcaacagtaatgaagtataaatcatcgttgtggtgtgctactcggttaattgagcattaacacacacaaacatgacgaggatggtataatctccaaaaatgtgtactttgttaggtgggaccctatagccttgattaatgtgctatgttaggcatgcctggaaacgtgtgacgcatatgttttgtgaacctgttgatattatatgtgcttttatattaccatattttattaaaatactaatatttattactagtaagatataacattctatctagcttaaaaactaaccataaatattccataataactagatttaccaaactaatatactaaatatacataataaatacaaaattaacaagacaataatcaatatttatgagcttaatatatttagacattatggttggtcgacgataatcatgctaacttttcgtaattgcttgattgaaatatgcttagaataatgcctctttgttctacatggcaaatagggaccattatggtgtaacaccctgggaaccacaaacaccccgaaatgctactaaactacacaactaaccttcatatataaaatttcgacagcatctcctttgaaaatttgcatagacgtggaagcaacagagtataaacagatctagctagctaagtttaaacggccggccaaacgtgcaagcgctactagacaattcagtacattaaaaacgtccgcaatgtgttattaagttgtctaagcgtcaatttatttacaattgaatatatcctgcca

SEQ ID NO: 195 - DNA, 19324 bp, Artificial Sequence
  RV029479 T-DNA
aattacaacggtatatatcctgtcagccaacaccaaaacatcaaaaaaatcgggatcaggatcaggatctgcggccgcatcctgcaggtttaaacggccggccttcactagctagctgctaagctcaaacgagcaggaagcaacgagagggtggcgcgcgaccgacgtgcgtacgtagcatgagcctgagtggagacgttggacgtgtatgtatatacctctctgcgtgttaactatgtacgtaagcggcaggcagtgcaataagtgtggctctgtagtatgtacgtgcgggtacgatgctgtaagctactgaggcaagtccataaataaataatgacacgtgcgtgttctataatctcttcgcttcttcatttgtccccttgcggagtttggcatccattgatgccgttacgctgagaacagacacagcagacgaaccaaaagtgagttcttgtatgaaactatgacccttcatcgctaggctcaaacagcaccccgtacgaacacagcaaattagtcatctaactattagcccctacatgtttcagacgatacataaatatagcccatccttagcaattagctattggccctgcccatcccaagcaatgatctcgaagtatttttaatatatagtatttttaatatgtagcttttaaaattagaagataattttgagacaaaaatctccaagtatttttttgggtattttttactgcctccgtttttctttatttctcgtcacctagtttaattttgtgctaatcggctataaacgaaacagagagaaaagttactctaaaagcaactccaacagattagatataaatcttatatcctgcctagagctgttaaaaagatagacaactttagtggattagtgtatgcaacaaactctccaaatttaagtatcccaactacccaacgcatatcgttcccttttcattggcgcacgaactttcacctgctatagccgacgtacatgttcgttttttttgggcggcgcttactttcttccccgttcgttctcagcatcgcaactcaatttgttatggcggagaagcccttgtatcccaggtagtaatgcacagatatgcattattattattcataaaatcgagctagttaccctatgaggtgacatgaagcgctcacggttactatgacggttagcttcacgactgttggtggcagtagcgtacgacttagctatagttccggacttacctaactgactagagtcacacttagctgaccctagtcacttaataacttcgtatagcatacattatacgaagttatggcgcgccaagcttggatctcctgcaggatctggccggccggatgggcggatctcgtacctcaactttgtatagaaaagttgggccagaatggcccggaccgggttaccaagcggccgcggaattcatcaggatattcttgtttaagatgttgaactctatggaggtttgtatgaactgatgatctaggaccggataagttcccttcttcatagcgaacttattcaaagaatgttttgtgtatcattcttgttacattgttattaatgaaaaaatattattggtcattggactgaacacgagtgttaaatatggaccaggccccaaataagatccattgatatatgaattaaataacaagaataaatcgagtcaccaaaccacttgccttttttaacgagacttgttcaccaacttgatacaaaagtcattatcctatgcaaatcaataatcatacaaaaatatccaataacactaaaaaattaaaagaaatggataatttcacaatatgttatacgataaagaagttacttttccaagaaattcactgattttataagcccacttgcattagataaatggcaaaaaaaaacaaaaaggaaaagaaataaagcacgaagaattctagaaaatacgaaatacgcttcaatgcagtgggacccacggttcaattattgccaattttcagctccaccgtatatttaaaaaataaaacgataatgctaaaaaaatataaatcgtaacgatcgttaaatctcaacggctggatcttatgacgaccgttagaaattgtggttgtcgacgagtcagtaataaacggcgtcaaagtggttgcagccggcacacacgagtcgtgtttatcaactcaaagcacaaatacttttcctcaacctaaaaataaggcaattagccaaaaacaactttgcgtgtaaacaacgctcaatacacgtgtcattttattattagctattgcttcaccgccttagctttctcgtgacctagtcgtcctcgtcttttcttcttcttcttctataaaacaatacccaaagagctcttcttcttcacaattcagatttcaatttctcaaaatcttaaaaactttctctcaattctctctaccgtgatcaaggtaaatttctgtgttccttattctctcaaaatcttcgattttgttttcgttcgatcccaatttcgtatatgttctttggtttagattctgttaatcttagatcgaagacgattttctgggtttgatcgttagatatcatcttaattctcgattagggtttcatagatatcatccgatttgttcaaataatttgagttttgtcgaataattactcttcgatttgtgatttctatctagatctggtgttagtttctagtttgtgcgatcgaatttgtcgattaatctgagtttttctgattaacagcggccgggatccccatggaacctcaccaacaacaaccaaatgaggataataacggtggcgccaaagggaactttctttgcaggcaaaccagtacaaggtggaatcccactactgaccagataagaatattgaaggaactgtactacatcaaaggtgttaggtccccaaatggagctgagattcagcagatctctgctaggcttagaaagtacggcaagattgaaggcaagaatgtattttattggtttcagaaccataaagctcgtgagaggcaaaagaaaagactcaccaatgaagtccccatgcaacaaagaactgcctggaaacctgaagattattactcttacaagtactccaacagtaataataatcctgggttttcttcggcttcttcatctgcaaataccggtgtggttactgttgggcagacagatagtcatggatatggatcggtaaccatgcaggagaagaattcttgggactgttcagcaccagctggtggtagcaatggtgctggtagtggatccatgagcaatattaactatggatcaggggttgacattaactctcacagttcatcctatgctgtatttggtcaagaacaagaagcagctgcaaagattgagactcttcctctatttccaatgcttggtgaggacatcagtagctctttcaacatcaacaatatcaacccagacttttattacagtagcggctgtggctatggtgattatggcaatgacacttcttcccgtacttccctggaccttagtctctactcctacaatggccaaccacaagattattaggtacctgacatcttatagtctgcaacctctcgtgtctgaattcctatctttatcaagtgttattgcttccacgactataggacagctttcgtcgaaaggttttgctcatgtgatctcgaaggattcatctagtctgatttttcgtgacttgtatcggttttattggattcatccaacatatatcaataaaaaatgagttgtgtttcctttcttcctagttcagttaaaattatttccctcctgcgcttgtgctgtaattgtctgtgtacctgttgtttgtgactgtgttagttcccttggatatgatttcgtatttgatatgtacatggagatagcttagcttcattattggagtatgaagttagtatgacatagtcactctcctggaaaattgacactgcaaaccatatttttattctgaaccacaaatcctagtcagtccgctggcatatgccgtccgtttgctgaatccagaacgtgggtttggagatgtacggctgagatgcctctatgcgaaggggatttcgtggtgaaacgagatgggagtagagcaacgcccgtggaagatgcttcaaacttccacacttttgagcaacgatcggcagtagtaaggtagacgatttcaagatcaaagcatatgaagataaacaacatcaacaacaaaatttgttggggttctatagagagaaacagagctacatacatacactgttttgtatctaccatctgagatgatgaaaagatgaaaaactaaagaatgccccggcgccaacgccaggacacgccgcgcgcgcgtcacccgagccatctcttgacccagccggcgctgtatatttacacacgttgcagcatcgatcaccacctgttcgatcgcgtcgccgtcaccaagcttggcgcgccggtcacccggtccgggcctagaaggccacccggggctcggcgttaggcttttagtccgctaggtggctagaccgaggttaggacgctagttcactaggggcctagtggtgttttaaggatgggcaagtttgtacaaaaaagcaggctggatcggccagaatggccccggaccgggttaccaagcggccgcttaaaaccttattaagtggcatgggtaacggttcaatatgatcctatcggatcaaaccgggttacatatattattgaacccggttttattggtacgatcgttaagtctcaacatctggctctaataaccgggacgatagagattgtggttagaaataaacggcgttaaaattggttgcagccgcgggcacacggatcgtgtttatcaaataaggcaattagccaaaaaatcgtttcgtgtaaaagttacgtgtcaagctttggttggttattgcttcaccgccttagctttctcgtgaccgactcgtcctcgtctttttttcttcttctataaattaataacctaagacctattcttcttcacaaattcagattccaaatttctcaaactctgaaatcgttctttcaaatctctcaatcgggatcaaggtaaatttctgggttcttattcagtttcttcgattattttccattcgatcgcaatttcgtccctgttctttgagtttgattcggttaatctttgatcggagataaatatctgagtttcatcgctagatctcatctatattctgaactagggttcgtagatttcacagatttgtatatttaggcgtcgattctttgaatttgatccgatatgtgatttatattcagatctggtggtagcttttttaatcggatttgagattatccaagcgattaatctcagttttttgtgaattacagggatccgcccatggaccttaggctcatatttgggcctacctgtaccggcaagacctccaccgcaatcgcattggcccagcaaacagggttgccagttctgtctcttgatagggtgcaatgctgtcctcagctgtccaccggaagtggcaggcctactgttgaggaactcaagggaactaccagactctacttggacgatcgccctttggtgaagggcatcatcactgctaagcaagctcacgagaggcttattgctgaggtgcacaaccacgaggcaaagggcggacttatcttggagggaggctctatatccttgctgagatgcatggctcagtcaagatactggaacgctgatttccgctggcacatcatcagaaacgagctggccgatgaggaatcattcatgtccgttgccaagactcgcgtcaaacagatgctgagaccaagtgccgggttgtctatcattcaagagttggtgcaactctggcgcgaaccaagacttaggcccatccttgaaggcatcgatggttatcgctacgccctccttttcgccacccagaaccaaataactcctgatatgcttctccagctggacgctgacatggaaaacaagctcatccacggaatcgcacaagaattcctgatccacgctcgtcgccaagagcagaagttccctcttgttggcgctaccgccgtcgaagcctttgaaggccctccttttagaatgtagttcgaactggccaggtaccaaacaagtatgaactaaaatgcatgtaggtgtaagagctcatggagagcatggaatattgtatccgaccatgtaacagtataataactgagctccatctcacttcttctatgaataaacaaaggatgttatgatatattaacactctatctatgcaccttattgttctatgataaatttcctcttattattataaatcatctgaatcgtgacggcttatggaatgcttcaaatagtacaaaaacaaatgtgtactataagactttctaaacaattctaaccttagcattgtgaacgagacataagtgttaagaagacataacaattataatggaagaagtttgtctccatttatatattatatattacccacttatgtattatattaggatgttaaggagacataacaattataaagagagaagtttgtatccatttatatattatatactacccatttatatattatacttatccacttatttaatgtctttataaggtttgatccatgatatttctaatattttagttgatatgtatatgaaaaggtactatttgaactctcttactctgtataaaggttggatcatccttaaagtgggtctatttaattttattgcttcttacagataaaaaaaaaattatgagttggtttgataaaatattgaaggatttaaaataataataaataacatataatatatgtatataaatttattataatataacatttatctataaaaaagtaaatattgtcataaatctatacaatcgtttagccttgctggaacgaatctcaattatttaaacgagagtaaacatatttgactttttggttatttaacaaattattatttaacactatatgaaatttttttttttatcagcaaagaataaaattaaattaagaaggacaatggtgtcccaatccttatacaaccaacttccacaagaaagtcaagtcagagacaacaaaaaaacaagcaaaggaaattttttaatttgagttgtcttgtttgctgcataatttatgcagtaaaacactacacataacccttttagcagtagagcaatggttgaccgtgtgcttagcttcttttattttatttttttatcagcaaagaataaataaaataaaatgagacacttcagggatgtttcatgggcgcgccggtcacccggtccgggcctagaaggccacccggggtcggaggagactagccgttagttagtgcagaccgtctctaatcagtgactagcgacgtcccgacccacccagctttcttgtacaaagtggcccggggcggccgaagctggccttctaggcccggaccgggtgaccaagcttggcgcgcccagggcccatcgatatcggtaccctgggatccgatatcttattagtgtttgtgcaaattcgactctacttgagttaggtagacagattcatggattgagtattaagtctagctttgattcttctagctttgtgggaagttctttagtctcgttgtattcaaagtgtggtgttcctgaaggagcttatcaagtttttaacgaggtgcctgtgaagaatctcgggatttggaacgctatgctcaaggcgtatgcgcaacattcacatactcaaaaggttattgaattgttcaaaaggatgaagctttctggaatgaaaccaaatttcataacttttttgaatgtgctcaatgcttgtagtcacgcgggtctagttgatgaagggagatactactttgatcagatgaaagaatcgaggattgagccgacggataagcattacgcttccttggtggatatgttaggacgagctggtagattacaagaagcacttgaagttatcactaatatgccgattgatcccacggaatctgtatggggagctttattaacgagttgtacagtccacaagaacacagagcttgcagcatttgcagcagacaaggtcttcgaattaggaccagtgagttccggtatgcacatttcgttatccaatgcttatgcagccgatggtagattcgaagacgcagctaaagctagaaaattgcttcgagaccgaggggaaaagaaggaaacagggctaagttgggttgaagaaaggaacaaggttcatacatttgcagctggagaaagacgtcatgagaaaagcaaggagatatatgagaagctggctgagttaggggaagagatggagaaagcgggttacattgcagacacaagctatgttctgagagaagtggatggtgacgagaagaatcaaaccataaggtatcatagtgagagattagctattgcttttggactgatcacgtttccagctgatagaccgatccgagtaatgaagaatctgcgtgtttgcggtgattgccataacgcgatcaagttcatgtccgtatgtacgagacgagtgatcattgtgagagataataatcggtttcatcggtttgaagatggcaagtgttcttgtaatgactattggtgaagaagacaaatgagagttggtttatatttaaccataatttcattcagttcacactgaaccggcgaaatttctttgccagacctattcggaattgaaacaagtggagtctcgaaacgaaaagaactttctggaattcgtttgctcacaaagctaaaaacggttgatttcatcgaaatacggcgtcgttttcaaagaacaatccagaaatcactggttttcctttatttcaaaagaagagactagaactttatttctcctctataaaatcactttgttttttcctctcttcttcataaatcaacaaaacaatcacaaatctctcgaaacgctctcgaagttccaaattttctcttagcattctctttcgtttctcgtttgcgttgaatcaaagttcgttgcgggatccaccatgtccaacctgctcacggttcaccagaaccttccggctcttccagtggacgcgacgtccgatgaagtcaggaagaacctcatggacatgttccgcgacaggcaagcgttcagcgagcacacctggaagatgctgctctccgtctgccgctcctgggctgcatggtgcaagctgaacaacaggaagtggttccccgctgagcccgaggacgtgagggattaccttctgtacctgcaagcgcgaggtttgtttctgcttctacctttgatatatatataataattatcattaattagtagtaatataatatttcaaatatttttttcaaaataaaagaatgtagtatatagcaattgcttttctgtagtttataagtgtgtatattttaatttataacttttctaatatatgaccaaaacatggtgatgcctaggtctggcagtgaagaccatccagcaacaccttggacaactgaacatgcttcacaggcgctccggcctcccgcgccccagcgactcgaacgccgtgagcctcgtcatgcgccgcatcaggaaggaaaacgtcgatgccggcgaaagggcaaagcaggccctcgcgttcgagaggaccgatttcgaccaggtccgcagcctgatggagaacagcgacaggtgccaggacattaggaacctggcgttcctcggaattgcatacaacacgctcctcaggatcgcggaaattgcccgcattcgcgtgaaggacattagccgcaccgacggcggcaggatgcttatccacattggcaggaccaagacgctcgtttccaccgcaggcgtcgaaaaggccctcagcctcggagtgaccaagctcgtcgaacgctggatctccgtgtccggcgtcgcggacgacccaaacaactacctcttctgccgcgtccgcaagaacggggtggctgcccctagcgccaccagccaactcagcacgagggccttggaaggtattttcgaggccacccaccgcctgatctacggcgcgaaggatgacagcggtcaacgctacctcgcatggtccgggcactccgcccgcgttggagctgctagggacatggcccgcgccggtgtttccatccccgaaatcatgcaggcgggtggatggacgaacgtgaacattgtcatgaactacattcgcaaccttgacagcgagacgggcgcaatggttcgcctcctggaagatggtgactgaggtaccgttaacagatctactaactatctatactgtaataatgttgtatagccgccggatagctagctagtttagtcattcagcggcgatgggtaataataaagtgtcatccatccatcaccatgcgtggcaacgtgagcaatgacctgattgaacaaattgaaatgaaaagaagaaatatgttatatgtcaacgagatttcctcataatgccactgacgacgtgtgtccaagaaatgtatcagtgatacgtatattcacaatttttttatgacttatactcacaatttgtttttttactacttatactcacaatttgttgtgcgtaccataacaatttcgatcgaatatatatcagaaagttgacgaaagtaagctcactcaaaaagttaaatgggctgcggaagctgcgtcaggcccaagttttggctattctatccggtatccacgattttgatggctgagggacatatgttcgcttaagcttcggtccgggcctagaaggccgatctcccgggcaactttattatacaaagttgatcacgtgagagtctaaaaacggcccctaactaacgcttagttgcccgctagattagtcccccgttagtgcctagttagacacacgacgaactaggggctataaggatttaaatatggtacggatccgtcgacggcgcgccgcggacctgaattccagcacactggcggccgttaataacttcgtatagcatacattatacgaagttatagtggcatcacgtttctagttctagacccatcagctgaggtacaaattacggccagaatggccatctggattcagcagggggtgattgcggttacatcatgtacggaaaaataattctaatccttgatttaaatttgaacttgactatttatttattctttatttcattttgtaaatcattttatgtatctcctggcaagcaattttatccaccttgcaccaacaccttcgggttccataatcaaaccaccttaacttcacaccatgctgtaactcacaccgcccagcatctccaatgtgaaagaagctaaaatttaataaacaatcatacgaagcagtgacaaaataccagatggtattaatgcttcgataaaattaattggaaagtataaaatggtagaaaataataaattataattaatttaagtaagataaaaaataattaaaaactaaaatgttaaaattttaaaaaaattattttaaataatatttaaaaacattaaaaatcattttaaaaaatttatttatagaacaattaaataaatatttcagctaataaaaaacaaaagcttacctagccttagaagacaacttgtccaacaattagatgatacccattgcccttacgttttctttaacatcaattattgtttttgtcaacaagctatcttttagttttattttattggtaaaaaatatgtcgccttcaagttgcatcatttaacacatctcgtcattagaaaaataaaactcttccctaaacgattagtagaaaaaatcattcgataataaataagaaagaaaaattagaaaaaaataacttcattttaaaaaaatcattaaggctatattttttaaatgactaattttatatagactgtaactaaaagtatacaatttattatgctatgtatcttaaagaattacttataaaaatctacggaagaatatcttacaaagtgaaaaacaaatgagaaagaatttagtgggatgattatgattttatttgaaaattgaaaaaataattattaaagactttagtggagtaagaaagctttcctattagtcttttcttatccataaaaaaaaaaaaaaaaatctagcgtgacagcttttccatagattttaataatgtaaaatactggtagcagccgaccgttcaggtaatggacactgtggtcctaacttgcaacgggtgcgggcccaatttaataacgccgtggtaacggataaagccaagcgtgaagcggtgaaggtacatctctgactccgtcaagattacgaaaccgtcaactacgaaggactccccgaaatatcatctgtgtcataaacaccaagtcacaccatacatgggcacgcgtcacaatatgattggagaacggttccaccgcatatgctataaaatgcccccacacccctcgaccctaatcgcacttcaattgcaatcaaattagttcattctctttgcgcagttccctacctctcctttcaaggttcgtagatttcttccgtttttttttcttcttctttattgtttgttctacatcagcatgatgttgatttgattgtgttttctatcgtttcatcgattataaattttcataatcagaagattcagcttttattaatgcaagaacgtccttaattgatgattttataaccgtaaattaggtctaattagagtttttttcataaagattttcagatccgtttacaacaagccttaattgttgattctgtagtcgtagattaaggtttttttcatgaactacttcagatccgttaaacaacagccttatttgttgatacttcagtcgtttttcaagaaattgttcagatccgttgataaaagccttattcgttgattctgtatggtatttcaagagatattgctcaggtcctttagcaactaccttatttgttgattctgtggccatagattaggattttttttcacgaaattgcttcttgaaattacgtgatggattttgattctgatttatcttgtgattgttgactctacagccatggctgcaactactcttacatctgctttacctggtgctttcagttcatcccagagaccaagtgctcctttcaacttacaaagatcacctagagtgcttagaaggttcaacagaaagacaggacgtcaacctcgtggacttgttcgtgctgcaaaggctcaagcggcgcaaaacctgccagagaaattcgatgaaacaagactctgggaggccctcaggggatttggggttagtccaagtagggttacttacgctcccgtcggattcggagattaccactggaccgtcacagatgaagacgggagaccttggttcgcaactgtcagtgacctcgaacacaaagagcattgcgggcagggagcacaagcagcccttaaaggactcagacaagctatggacactgccctcgcacttagagatagggacggactcagattcgtggttgctccagtggcagcaacagatgggggtggccctgtccttccccttgacgctaggtatgcactcacagtcttccctcacgtcccaggaagaacaggagagttcggacaaagactcacagaggcagagagggacagactgcttgctcttctggcagaactccacggaagaacacctcctgaaacaaccccaccagccgatatggaaccaccaggacttcctggtgttagagcagcactcgccgaaagtgaaggaccttggagtggaggaccatttgcagaacccgctagacttcttctcagagaacacgaggccacactgcacgcaagactcgctgaattcgaagccctcgtcgcaagagttaagggtcgtggagcacctcttgtcgttacccacggagaaccacacccaggcaacttgatcctcggagaggaaggctatctcctcgtggactgggatacagttggactggctccagctgaaagggatttgagtctcatctcagacgacccagctgacctcgcaagatacgcagagcttacaggaagaactccagacccagacgcactcgcactctatagactgcgttggagtctccttgatgtggctgagttcgtcgagtggttcagggctgaacaccaaagaacccaagacaccgagagtgcatggaaggggttcactgacacacttgggcaattggctgctggtggatcagctgcatagcaaacttatctctgttatgaatcagaagaagttcatgtctcgtttcatttaaaactttggtggtttgtgttttggggccttgtaaagcccctgatgaataattgttcaactatgtttccgttcctgtgttatacctttctttctaatgagtaatgacatcaaacttcttctgtattgaaattatgtccttgtgagtctctttatcatcgtttcgtctttacattatatgtgctacttttgtctaatgagcctgaaaagtggctccaatggtacgcactggaagatttgttggcttctggtagatatagcgacagtgttgagcttgtaatatcatgtctcttattgctaaattagttcctttcttaacagaaaccttcaaagtttttgtttttgttttcatttacctaatgtacacatacgctggccatgactaacaacatgtccaggcttagagcatatttttttctagcttaaattgttaacttgtcattcagtaaaatccgagaattgtgaagctctaattgaagctaattcgttttataaagtcagttaaaaagtatactaaattatccaacttttcttcaaaatctcaaaattctatgacaaaacgatagtctttgtttatgtcagtaccacaaagaggtggaaaaaaacaccaaaaaaacaataagcaaactatacactgagaagaaaaataaaagagagctcaatagatgttttatactaacggtagattagatcaaagatccaagctttactctacatagagcagaacccagaatcccttcatatctcttttattctagcaccgataatctactgaaaagaagacacttagagctctgtctctttgtcaaagaagtcccagccgtcatccagaagctccttacgttcattaacagaggccgcaattggatcgggtttacttattttgtgggtatctatacttttattagatttttaatcaggctcctgatttctttttatttcgattgaattcctgaacttgtattattcagtagatcgaataaattataaaaagataaaatcataaaataatattttatcctatcaatcatattaaagcaatgaatatgtaaaattaatcttatctttattttaaaaaatcatataggtttagtatttttttaaaaataaagataggattagttttactattcactgcttattacttttaaaaaaatcataaaggtttagtatttttttaaaataaatataggaatagttttactattcactgctttaatagaaaaatagtttaaaatttaagatagttttaatcccagcatttgccacgtttgaacgtgagccgaaacgatgtcgttacattatcttaacctagctgaaacgatgtcgtcataatatcgccaaatgccaactggactacgtcgaacccacaaatcccacaaagcgcgtgaaatcaaatcgctcaaaccacaaaaaagaacaacgcgtttgttacacgctcaatcccacgcgagtagagcacagtaaccttcaaataagcgaatggggcataatcagaaatccgaaataaacctaggggcattatcggaaatgaaaagtagctcactcaatataaaaatctaggaaccctagttttcgttatcactctgtgctccctcgctctatttctcagtctctgtgtttgcggctgaggattccgaacgagtgaccttcttcgtttctcgcaaaggtaacagcctctgctcttgtctcttcgattcgatctatgcctgtctcttatttacgatgatgtttcttcggttatgtttttttatttatgctttatgctgttgatgttcggttgtttgtttcgctttgtttttgtggttcagttttttaggattcttttggtttttgaatcgattaatcggaagagattttcgagttatttggtgtgttggaggtgaatcttttttttgaggtcatagatctgttgtatttgtgttataaacatgcgactttgtatgattttttacgaggttatgatgttctggttgttttattatgaatctgttgagacagaaccatgatttttgttgatgttcgtttacactattaaaggtttgttttaacaggattaaaagttttttaagcatgttgaaggagtcttgtagatatgtaaccgtcgatagtttttttgtgggtttgttcacatgttatcaagcttaatcttttactatgtatgcgaccatatctggatccagcaaaggcgattttttaattccttgtgaaacttttgtaatatgaagttgaaattttgttattggtaaactataaatgtgtgaagttggagtatacctttaccttcttatttggctttgtgatagtttaatttatatgtattttgagttctgacttgtatttctttgaattgattctagtttaagtaatcatggcctcctccgagaacgtcatcaccgagttcatgcgcttcaaggtgcgcatggagggcaccgtgaacggccacgagttcgagatcgagggcgagggcgagggccgcccctacgagggccacaacaccgtgaagctgaaggtgacgaagggcggccccctgcccttcgcctgggacatcctgtccccccagttccagtacggctccaaggtgtacgtgaagcaccccgccgacatccccgactacaagaagctgtccttccccgagggcttcaagtgggagcgcgtgatgaacttcgaggacggcggcgtggcgaccgtgacccaggactcctccctgcaggacggctgcttcatctacaaggtgaagttcatcggcgtgaacttcccctccgacggccccgtgatgcagaagaagaccatgggctgggaggcctccaccgagcgcctgtacccccgcgacggcgtgctgaagggcgagacccacaaggccctgaagctgaaggacggcggccactacctggtggagttcaagtccatctacatggccaagaagcccgtgcagctgcccggctactactacgtggacgccaagctggacatcacctcccacaacgaggactacaccatcgtggagcagtacgagcgcaccgagggccgccaccacctgttcctgtagttttgtgatctgatgataagtggttggttcgtgtctcatgcacttgggaggtgatctatttcacctggtgtagtttgtgtttccgtcagttggaaaaacttatccctatcgatttcgttttcattttctgcttttcttttatgtaccttcgtttgggcttgtaacgggcctttgtatttcaactctcaataataatccaagtgcatgttaaacaatttgtcatctgtttcggctttgatatactactggtgaagatgggccgtactactgcatcacaacgaaaaataataataagatgaaaaacttgaagtggaaaaaaaaaaaaacttgaatgttcactactactcattgaccataatgtttaacatacatagctcaatagtatttttgtgaatatggcaacacaaacagtccaaaacaattgtctcttactataccaaaccaagggcgccgcttgtttgccactctttgtgtgcaatagtgtgattaccacatctccacattcaatatattccctgaattatctgacgattttgatggctcactgttttcccaagtcttgaattgtcttctgtgcgccagtcaaatgcatatgtgttgagtttatcttttaaatatcaagcttttgtttttaacttttgtttgtaaccaaaaactcacagtaggagtttgatcacataattttatgtttgcctttgcaatttctagtgagtctttgattaaaagcttgaaaagaaaatgcagccaagcttaccaagtaagttatgtgtattaaccagaggaagagagaatcttgcaaaatttcaacaaacacaaaaagaagtattactacgattggtggagaaagaaaacgattccaaatcttgaactgttgttgtaaaagcatagcagaaagtgggagacaaccgaaatagaaatgactataacttaatttaatgttatcattataatttcttctagcaaatatttagaaagtaaatatcacatcaacctttaatgtaattaagctttctctttttgattcatgtgagatgaaaagaaaaaaaagaagagaaaagtgtagaaaacacatcatttctaagctgaagctgaggtacaaattaattaataagtgactagggtcacgtgaccctagtcacttatgattccgatgacttcgtaggttcctagctcaagccgctcgtgtccaagcgtcacttacgattagctaatgattacggcatctaggaccgactagttcttatgtgcttctagtctccaaatgtggttgatagttattttgctctaagatcaacagtaatgaagtataaatcatcgttgtggtgtgctactcggttaattgagcattaacacacacaaacatgacgaggatggtataatctccaaaaatgtgtactttgttaggtgggaccctatagccttgattaatgtgctatgttaggcatgcctggaaacgtgtgacgcatatgttttgtgaacctgttgatattatatgtgcttttatattaccatattttattaaaatactaatatttattactagtaagatataacattctatctagcttaaaaactaaccataaatattccataataactagatttaccaaactaatatactaaatatacataataaatacaaaattaacaagacaataatcaatatttatgagcttaatatatttagacattatggttggtcgacgataatcatgctaacttttcgtaattgcttgattgaaatatgcttagaataatgcctctttgttctacatggcaaatagggaccattatggtgtaacaccctgggaaccacaaacaccccgaaatgctactaaactacacaactaaccttcatatataaaatttcgacagcatctcctttgaaaatttgcatagacgtggaagcaacagagtataaacagatctagctagctaagtttaaacggccggccaaacgtgcaagcgctactagacaattcagtacattaaaaacgtccgcaatgtgttattaagttgtctaagcgtcaatttatttacaattgaatatatcctgcca

SEQ ID NO: 196 - DNA, 15290 bp, Artificial Sequence
  RV026592 T-DNA
aattacaacggtatatatcctgtcagccaacaccaaaacatcaaaaaaatcgggatcaggatcaggatctgcggccgcatcctgcaggtttaaacggccggccttcactagctagctgctaagctcaaacgagcaggaagcaacgagagggtggcgcgcgaccgacgtgcgtacgtagcatgagcctgagtggagacgttggacgtgtatgtatatacctctctgcgtgttaactatgtacgtaagcggcaggcagtgcaataagtgtggctctgtagtatgtacgtgcgggtacgatgctgtaagctactgaggcaagtccataaataaataatgacacgtgcgtgttctataatctcttcgcttcttcatttgtccccttgcggagtttggcatccattgatgccgttacgctgagaacagacacagcagacgaaccaaaagtgagttcttgtatgaaactatgacccttcatcgctaggctcaaacagcaccccgtacgaacacagcaaattagtcatctaactattagcccctacatgtttcagacgatacataaatatagcccatccttagcaattagctattggccctgcccatcccaagcaatgatctcgaagtatttttaatatatagtatttttaatatgtagcttttaaaattagaagataattttgagacaaaaatctccaagtatttttttgggtattttttactgcctccgtttttctttatttctcgtcacctagtttaattttgtgctaatcggctataaacgaaacagagagaaaagttactctaaaagcaactccaacagattagatataaatcttatatcctgcctagagctgttaaaaagatagacaactttagtggattagtgtatgcaacaaactctccaaatttaagtatcccaactacccaacgcatatcgttcccttttcattggcgcacgaactttcacctgctatagccgacgtacatgttcgttttttttgggcggcgcttactttcttccccgttcgttctcagcatcgcaactcaatttgttatggcggagaagcccttgtatcccaggtagtaatgcacagatatgcattattattattcataaaatcgagctagttaccctatgaggtgacatgaagcgctcacggttactatgacggttagcttcacgactgttggtggcagtagcgtacgacttagctatagttccggacttacctaactgactagagtcacacttagctgaccctagtcacttaggcgcgccaagcttggatctcctgcaggatctggccggccggatgggcggatctcgtacctcaactttgtatagaaaagttgggccagaatggcccggaccgggttaccaagcggccgcgaattccagaagaccaaagggcaattgagacttttcaacaaagggtaatatcgggaaacctcctcggattccattgcccagctatctgtcacttcatcaaaaggacagtagaaaaggaaggtggcacctacaaatgccatcattgcgataaaggaaaggctatcgttcaagatgcctctgccgacagtggtcccaaagatggacccccacccacgaggagcatcgtggaaaaagaagacgttccaaccacgtcttcaaagcaagtggattgatgtgatatctccactgacgtaagggatgacgcacaatcccactatccttcgcaagacccttcctctatataaggaagttcatttcatttggagaggacccatggaacatcaacacaacatagaagatggtggtaaaaatagtaacaacagtttcctgtgcaggcaaagtagtagccgttggacgccaacgagcgatcagataagaatattgaaggatctctactacaacaatggagttaggtctccaactgctgaacagattcagaggatatctgctaagttgagacagtacggtaagattgaaggcaaaaatgtgttttattggtttcagaaccataaagctcgtgaaagacaaaagaagaggctcattgctgctgcctctgccactgataataataatatctcttccatgcaaatgattccacatctttggagatctcctgatgatcaccacaagtacaacactactactactaatccaggtgttcagtgtccatcaccatcttcacatggggtattaccagtggtacagactggaaactatggttatggaactttggctatggagaagagctttagggagtgttcaatatcaccaccaggtggtagttatcatcaaaatttgacatgggttggtgttgatccttacaacaatatgagtactacttctccagcaacttacccttttcttgaaaaaagcaacaacaaacactatgaagaaaccctagatgaagagcaagaagaagaaaattaccaaaggggtaactctgctttagaaactctgtcacttttccccatgcatgaagagaacatcatctcaaatttctgcatcaaacatcatgaatcttctggaggatggtatcattctgataataacaatttggctgctcttgaacttactctcaactctttcccctaaggtacctgacatcttatagtctgcaacctctcgtgtctgaattcctatctttatcaagtgttattgcttccacgactataggacagctttcgtcgaaaggttttgctcatgtgatctcgaaggattcatctagtctgatttttcgtgacttgtatcggttttattggattcatccaacatatatcaataaaaaatgagttgtgtttcctttcttcctagttcagttaaaattatttccctcctgcgcttgtgctgtaattgtctgtgtacctgttgtttgtgactgtgttagttcccttggatatgatttcgtatttgatatgtacatggagatagcttagcttcattattggagtatgaagttagtatgacatagtcactctcctggaaaattgacactgcaaaccatatttttattctgaaccacaaatcctagtcagtccgctggcatatgccgtccgtttgctgaatccagaacgtgggtttggagatgtacggctgagatgcctctatgcgaaggggatttcgtggtgaaacgagatgggagtagagcaacgcccgtggaagatgcttcaaacttccacacttttgagcaacgatcggcagtagtaaggtagacgatttcaagatcaaagcatatgaagataaacaacatcaacaacaaaatttgttggggttctatagagagaaacagagctacatacatacactgttttgtatctaccatctgagatgatgaaaagatgaaaaactaaagaatgccccggcgccaacgccaggacacgccgcgcgcgcgtcacccgagccatctcttgacccagccggcgctgtatatttacacacgttgcagcatcgatcaccacctgttcgatcgcgtcgccgtcaccaagcttggcgcgccggtcacccggtccgggcctagaaggccacccggggctcggcgttaggcttttagtccgctaggtggctagaccgaggttaggacgctagttcactaggggcctagtggtgttttaaggatgggcaagtttgtacaaaaaagcaggctggcgccggaaccaattcagtcgagtgcggccgccagtgtgatggatatctcgacccgggtgattgcggttacatcatgtacggaaaaataattctaatccttgatttaaatttgaacttgactatttatttattctttatttcattttgtaaatcattttatgtatctcctggcaagcaattttatccaccttgcaccaacaccttcgggttccataatcaaaccaccttaacttcacaccatgctgtaactcacaccgcccagcatctccaatgtgaaagaagctaaaatttaataaacaatcatacgaagcagtgacaaaataccagatggtattaatgcttcgataaaattaattggaaagtataaaatggtagaaaataataaattataattaatttaagtaagataaaaaataattaaaaactaaaatgttaaaattttaaaaaaattattttaaataatatttaaaaacattaaaaatcattttaaaaaatttatttatagaacaattaaataaatatttcagctaataaaaaacaaaagcttacctagccttagaagacaacttgtccaacaattagatgatacccattgcccttacgttttctttaacatcaattattgtttttgtcaacaagctatcttttagttttattttattggtaaaaaatatgtcgccttcaagttgcatcatttaacacatctcgtcattagaaaaataaaactcttccctaaacgattagtagaaaaaatcattcgataataaataagaaagaaaaattagaaaaaaataacttcattttaaaaaaatcattaaggctatattttttaaatgactaattttatatagactgtaactaaaagtatacaatttattatgctatgtatcttaaagaattacttataaaaatctacggaagaatatcttacaaagtgaaaaacaaatgagaaagaatttagtgggatgattatgattttatttgaaaattgaaaaaataattattaaagactttagtggagtaagaaagctttcctattagtcttttcttatccataaaaaaaaaaaaaaaaatctagcgtgacagcttttccatagattttaataatgtaaaatactggtagcagccgaccgttcaggtaatggacactgtggtcctaacttgcaacgggtgcgggcccaatttaataacgccgtggtaacggataaagccaagcgtgaagcggtgaaggtacatctctgactccgtcaagattacgaaaccgtcaactacgaaggactccccgaaatatcatctgtgtcataaacaccaagtcacaccatacatgggcacgcgtcacaatatgattggagaacggttccaccgcatatgctataaaatgcccccacacccctcgaccctaatcgcacttcaattgcaatcaaattagttcattctctttgcgcagttccctacctctcctttcaaggttcgtagatttcttccgtttttttttcttcttctttattgtttgttctacatcagcatgatgttgatttgattgtgttttctatcgtttcatcgattataaattttcataatcagaagattcagcttttattaatgcaagaacgtccttaattgatgattttataaccgtaaattaggtctaattagagtttttttcataaagattttcagatccgtttacaacaagccttaattgttgattctgtagtcgtagattaaggtttttttcatgaactacttcagatccgttaaacaacagccttatttgttgatacttcagtcgtttttcaagaaattgttcagatccgttgataaaagccttattcgttgattctgtatggtatttcaagagatattgctcaggtcctttagcaactaccttatttgttgattctgtggccatagattaggattttttttcacgaaattgcttcttgaaattacgtgatggattttgattctgatttatcttgtgattgttgactctacagccatggcccacagcaagcacggcctgaaggaggagatgaccatgaagtaccacatggagggctgcgtgaacggccacaagttcgtgatcaccggcgagggcatcggctaccccttcaagggcaagcagaccatcaacctgtgcgtgatcgagggcggccccctgcccttcagcgaggacatcctgagcgccggcttcaagtacggcgaccggatcttcaccgagtacccccaggacatcgtggactacttcaagaacagctgccccgccggctacacctggggccggagcttcctgttcgaggacggcgccgtgtgcatctgtaacgtggacatcaccgtgagcgtgaaggagaactgcatctaccacaagagcatcttcaacggcgtgaacttccccgccgacggccccgtgatgaagaagatgaccaccaactgggaggccagctgcgagaagatcatgcccgtgcctaagcagggcatcctgaagggcgacgtgagcatgtacctgctgctgaaggacggcggccggtaccggtgccagttcgacaccgtgtacaaggccaagagcgtgcccagcaagatgcccgagtggcacttcatccagcacaagctgctgcgggaggaccggagcgacgccaagaaccagaagtggcagctgaccgagcacgccatcgccttccccagcgccctggcctgagagctcgaatttccccgatcgttcaaacatttggcaataaagtttcttaagattgaatcctgttgccggtcttgcgatgattatcatataatttctgttgaattacgttaagcatgtaataattaacatgtaatgcatgacgttatttatgagatgggtttttatgattagagtcccgcaattatacatttaatacgcgatagaaaacaaaatatagcgcgcaaactaggataaattatcgcgcgcggtgtcatctatgttactagatcgggaattctagtggccggcccagctgatatctagacccagctttcttgtacaaagtggccgttaacggatcggccagaatggcccggaccgggttaccgaattcgagctcggtaccctgggatccgatatcgatgggccctggccgaagcttggtcacccggtccgggcctagaaggccagcttcggccgccccgggcaactttattatacaaagttgatggtacggatccgtcgacggcgcgccgcggacctgaattccagcacactggcggccgttagtctaaaaacggcccctaactaacgcttagttgcccgctagattagtcccccgttagtgcctagttagacacacgacgaactaggggctactagtaacggccgccagtgtgctcggtacggccagaatggccatctggattcagcagggggtgattgcggttacatcatgtacggaaaaataattctaatccttgatttaaatttgaacttgactatttatttattctttatttcattttgtaaatcattttatgtatctcctggcaagcaattttatccaccttgcaccaacaccttcgggttccataatcaaaccaccttaacttcacaccatgctgtaactcacaccgcccagcatctccaatgtgaaagaagctaaaatttaataaacaatcatacgaagcagtgacaaaataccagatggtattaatgcttcgataaaattaattggaaagtataaaatggtagaaaataataaattataattaatttaagtaagataaaaaataattaaaaactaaaatgttaaaattttaaaaaaattattttaaataatatttaaaaacattaaaaatcattttaaaaaatttatttatagaacaattaaataaatatttcagctaataaaaaacaaaagcttacctagccttagaagacaacttgtccaacaattagatgatacccattgcccttacgttttctttaacatcaattattgtttttgtcaacaagctatcttttagttttattttattggtaaaaaatatgtcgccttcaagttgcatcatttaacacatctcgtcattagaaaaataaaactcttccctaaacgattagtagaaaaaatcattcgataataaataagaaagaaaaattagaaaaaaataacttcattttaaaaaaatcattaaggctatattttttaaatgactaattttatatagactgtaactaaaagtatacaatttattatgctatgtatcttaaagaattacttataaaaatctacggaagaatatcttacaaagtgaaaaacaaatgagaaagaatttagtgggatgattatgattttatttgaaaattgaaaaaataattattaaagactttagtggagtaagaaagctttcctattagtcttttcttatccataaaaaaaaaaaaaaaaatctagcgtgacagcttttccatagattttaataatgtaaaatactggtagcagccgaccgttcaggtaatggacactgtggtcctaacttgcaacgggtgcgggcccaatttaataacgccgtggtaacggataaagccaagcgtgaagcggtgaaggtacatctctgactccgtcaagattacgaaaccgtcaactacgaaggactccccgaaatatcatctgtgtcataaacaccaagtcacaccatacatgggcacgcgtcacaatatgattggagaacggttccaccgcatatgctataaaatgcccccacacccctcgaccctaatcgcacttcaattgcaatcaaattagttcattctctttgcgcagttccctacctctcctttcaaggttcgtagatttcttccgtttttttttcttcttctttattgtttgttctacatcagcatgatgttgatttgattgtgttttctatcgtttcatcgattataaattttcataatcagaagattcagcttttattaatgcaagaacgtccttaattgatgattttataaccgtaaattaggtctaattagagtttttttcataaagattttcagatccgtttacaacaagccttaattgttgattctgtagtcgtagattaaggtttttttcatgaactacttcagatccgttaaacaacagccttatttgttgatacttcagtcgtttttcaagaaattgttcagatccgttgataaaagccttattcgttgattctgtatggtatttcaagagatattgctcaggtcctttagcaactaccttatttgttgattctgtggccatagattaggattttttttcacgaaattgcttcttgaaattacgtgatggattttgattctgatttatcttgtgattgttgactctacagccatggctgcaactactcttacatctgctttacctggtgctttcagttcatcccagagaccaagtgctcctttcaacttacaaagatcacctagagtgcttagaaggttcaacagaaagacaggacgtcaacctcgtggacttgttcgtgctgcaaaggctcaagcggcgcaaaacctgccagagaaattcgatgaaacaagactctgggaggccctcaggggatttggggttagtccaagtagggttacttacgctcccgtcggattcggagattaccactggaccgtcacagatgaagacgggagaccttggttcgcaactgtcagtgacctcgaacacaaagagcattgcgggcagggagcacaagcagcccttaaaggactcagacaagctatggacactgccctcgcacttagagatagggacggactcagattcgtggttgctccagtggcagcaacagatgggggtggccctgtccttccccttgacgctaggtatgcactcacagtcttccctcacgtcccaggaagaacaggagagttcggacaaagactcacagaggcagagagggacagactgcttgctcttctggcagaactccacggaagaacacctcctgaaacaaccccaccagccgatatggaaccaccaggacttcctggtgttagagcagcactcgccgaaagtgaaggaccttggagtggaggaccatttgcagaacccgctagacttcttctcagagaacacgaggccacactgcacgcaagactcgctgaattcgaagccctcgtcgcaagagttaagggtcgtggagcacctcttgtcgttacccacggagaaccacacccaggcaacttgatcctcggagaggaaggctatctcctcgtggactgggatacagttggactggctccagctgaaagggatttgagtctcatctcagacgacccagctgacctcgcaagatacgcagagcttacaggaagaactccagacccagacgcactcgcactctatagactgcgttggagtctccttgatgtggctgagttcgtcgagtggttcagggctgaacaccaaagaacccaagacaccgagagtgcatggaaggggttcactgacacacttgggcaattggctgctggtggatcagctgcatagcaaacttatctctgttatgaatcagaagaagttcatgtctcgtttcatttaaaactttggtggtttgtgttttggggccttgtaaagcccctgatgaataattgttcaactatgtttccgttcctgtgttatacctttctttctaatgagtaatgacatcaaacttcttctgtattgaaattatgtccttgtgagtctctttatcatcgtttcgtctttacattatatgtgctacttttgtctaatgagcctgaaaagtggctccaatggtacgcactggaagatttgttggcttctggtagatatagcgacagtgttgagcttgtaatatcatgtctcttattgctaaattagttcctttcttaacagaaaccttcaaagtttttgtttttgttttcatttacctaatgtacacatacgctggccatgactaacaacatgtccaggcttagagcatatttttttctagcttaaattgttaacttgtcattcagtaaaatccgagaattgtgaagctctaattgaagctaattcgttttataaagtcagttaaaaagtatactaaattatccaacttttcttcaaaatctcaaaattctatgacaaaacgatagtctttgtttatgtcagtaccacaaagaggtggaaaaaaacaccaaaaaaacaataagcaaactatacactgagaagaaaaataaaagagagctcaatagatgttttatactaacggtagattagatcaaagatccaagctttactctacatagagcagaacccagaatcccttcatatctcttttattctagcaccgataatctactgaaaagaagacacttagagctctgtctctttgtcaaagaagtcccagccgtcatccagaagctccttacgttcattaacagaggccgcaattggatcgggtttacttattttgtgggtatctatacttttattagatttttaatcaggctcctgatttctttttatttcgattgaattcctgaacttgtattattcagtagatcgaataaattataaaaagataaaatcataaaataatattttatcctatcaatcatattaaagcaatgaatatgtaaaattaatcttatctttattttaaaaaatcatataggtttagtatttttttaaaaataaagataggattagttttactattcactgcttattacttttaaaaaaatcataaaggtttagtatttttttaaaataaatataggaatagttttactattcactgctttaatagaaaaatagtttaaaatttaagatagttttaatcccagcatttgccacgtttgaacgtgagccgaaacgatgtcgttacattatcttaacctagctgaaacgatgtcgtcataatatcgccaaatgccaactggactacgtcgaacccacaaatcccacaaagcgcgtgaaatcaaatcgctcaaaccacaaaaaagaacaacgcgtttgttacacgctcaatcccacgcgagtagagcacagtaaccttcaaataagcgaatggggcataatcagaaatccgaaataaacctaggggcattatcggaaatgaaaagtagctcactcaatataaaaatctaggaaccctagttttcgttatcactctgtgctccctcgctctatttctcagtctctgtgtttgcggctgaggattccgaacgagtgaccttcttcgtttctcgcaaaggtaacagcctctgctcttgtctcttcgattcgatctatgcctgtctcttatttacgatgatgtttcttcggttatgtttttttatttatgctttatgctgttgatgttcggttgtttgtttcgctttgtttttgtggttcagttttttaggattcttttggtttttgaatcgattaatcggaagagattttcgagttatttggtgtgttggaggtgaatcttttttttgaggtcatagatctgttgtatttgtgttataaacatgcgactttgtatgattttttacgaggttatgatgttctggttgttttattatgaatctgttgagacagaaccatgatttttgttgatgttcgtttacactattaaaggtttgttttaacaggattaaaagttttttaagcatgttgaaggagtcttgtagatatgtaaccgtcgatagtttttttgtgggtttgttcacatgttatcaagcttaatcttttactatgtatgcgaccatatctggatccagcaaaggcgattttttaattccttgtgaaacttttgtaatatgaagttgaaattttgttattggtaaactataaatgtgtgaagttggagtatacctttaccttcttatttggctttgtgatagtttaatttatatgtattttgagttctgacttgtatttctttgaattgattctagtttaagtaatcatggcctcctccgagaacgtcatcaccgagttcatgcgcttcaaggtgcgcatggagggcaccgtgaacggccacgagttcgagatcgagggcgagggcgagggccgcccctacgagggccacaacaccgtgaagctgaaggtgacgaagggcggccccctgcccttcgcctgggacatcctgtccccccagttccagtacggctccaaggtgtacgtgaagcaccccgccgacatccccgactacaagaagctgtccttccccgagggcttcaagtgggagcgcgtgatgaacttcgaggacggcggcgtggcgaccgtgacccaggactcctccctgcaggacggctgcttcatctacaaggtgaagttcatcggcgtgaacttcccctccgacggccccgtgatgcagaagaagaccatgggctgggaggcctccaccgagcgcctgtacccccgcgacggcgtgctgaagggcgagacccacaaggccctgaagctgaaggacggcggccactacctggtggagttcaagtccatctacatggccaagaagcccgtgcagctgcccggctactactacgtggacgccaagctggacatcacctcccacaacgaggactacaccatcgtggagcagtacgagcgcaccgagggccgccaccacctgttcctgtagttttgtgatctgatgataagtggttggttcgtgtctcatgcacttgggaggtgatctatttcacctggtgtagtttgtgtttccgtcagttggaaaaacttatccctatcgatttcgttttcattttctgcttttcttttatgtaccttcgtttgggcttgtaacgggcctttgtatttcaactctcaataataatccaagtgcatgttaaacaatttgtcatctgtttcggctttgatatactactggtgaagatgggccgtactactgcatcacaacgaaaaataataataagatgaaaaacttgaagtggaaaaaaaaaaaaacttgaatgttcactactactcattgaccataatgtttaacatacatagctcaatagtatttttgtgaatatggcaacacaaacagtccaaaacaattgtctcttactataccaaaccaagggcgccgcttgtttgccactctttgtgtgcaatagtgtgattaccacatctccacattcaatatattccctgaattatctgacgattttgatggctcactgttttcccaagtcttgaattgtcttctgtgcgccagtcaaatgcatatgtgttgagtttatcttttaaatatcaagcttttgtttttaacttttgtttgtaaccaaaaactcacagtaggagtttgatcacataattttatgtttgcctttgcaatttctagtgagtctttgattaaaagcttgaaaagaaaatgcagccaagcttaccaagtaagttatgtgtattaaccagaggaagagagaatcttgcaaaatttcaacaaacacaaaaagaagtattactacgattggtggagaaagaaaacgattccaaatcttgaactgttgttgtaaaagcatagcagaaagtgggagacaaccgaaatagaaatgactataacttaatttaatgttatcattataatttcttctagcaaatatttagaaagtaaatatcacatcaacctttaatgtaattaagctttctctttttgattcatgtgagatgaaaagaaaaaaaagaagagaaaagtgtagaaaacacatcatttctaagctgaagctgaggtacaaattaattaataagtgactagggtcacgtgaccctagtcacttatgattccgatgacttcgtaggttcctagctcaagccgctcgtgtccaagcgtcacttacgattagctaatgattacggcatctaggaccgactagttcttatgtgcttctagtctccaaatgtggttgatagttattttgctctaagatcaacagtaatgaagtataaatcatcgttgtggtgtgctactcggttaattgagcattaacacacacaaacatgacgaggatggtataatctccaaaaatgtgtactttgttaggtgggaccctatagccttgattaatgtgctatgttaggcatgcctggaaacgtgtgacgcatatgttttgtgaacctgttgatattatatgtgcttttatattaccatattttattaaaatactaatatttattactagtaagatataacattctatctagcttaaaaactaaccataaatattccataataactagatttaccaaactaatatactaaatatacataataaatacaaaattaacaagacaataatcaatatttatgagcttaatatatttagacattatggttggtcgacgataatcatgctaacttttcgtaattgcttgattgaaatatgcttagaataatgcctctttgttctacatggcaaatagggaccattatggtgtaacaccctgggaaccacaaacaccccgaaatgctactaaactacacaactaaccttcatatataaaatttcgacagcatctcctttgaaaatttgcatagacgtggaagcaacagagtataaacagatctagctagctaagtttaaacggccggccaaacgtgcaagcgctactagacaattcagtacattaaaaacgtccgcaatgtgttattaagttgtctaagcgtcaatttatttacaattgaatatatcctgcca

SEQ ID NO: 197 - DNA, 819 bp, Artificial Sequence
  WUS ortholog of Solanum lycopersicum with KpnI site replaced by changing C to T at 762bpSolanum lycopersicum coding sequence
atggaacatcaacacaacatagaagatggtggtaaaaatagtaacaacagtttcctgtgcaggcaaagtagtagccgttggacgccaacgagcgatcagataagaatattgaaggatctctactacaacaatggagttaggtctccaactgctgaacagattcagaggatatctgctaagttgagacagtacggtaagattgaaggcaaaaatgtgttttattggtttcagaaccataaagctcgtgaaagacaaaagaagaggctcattgctgctgcctctgccactgataataataatatctcttccatgcaaatgattccacatctttggagatctcctgatgatcaccacaagtacaacactactactactaatccaggtgttcagtgtccatcaccatcttcacatggggtattaccagtggtacagactggaaactatggttatggaactttggctatggagaagagctttagggagtgttcaatatcaccaccaggtggtagttatcatcaaaatttgacatgggttggtgttgatccttacaacaatatgagtactacttctccagcaacttacccttttcttgaaaaaagcaacaacaaacactatgaagaaaccctagatgaagagcaagaagaagaaaattaccaaaggggtaactctgctttagaaactctgtcacttttccccatgcatgaagagaacatcatctcaaatttctgcatcaaacatcatgaatcttctggaggatggtaccattctgataataacaatttggctgctcttgaacttactctcaactctttcccctaa

SEQ ID NO: 198 - protein, 272 aa, Solanum lycopersicum
MEHQHNIEDGGKNSNNSFLCRQSSSRWTPTSDQIRILKDLYYNNGVRSPTAEQIQRISAKLRQYGKIEGKNVFYWFQNHKARERQKKRLIAAASATDNNNISSMQMIPHLWRSPDDHHKYNTTTTNPGVQCPSPSSHGVLPVVQTGNYGYGTLAMEKSFRECSISPPGGSYHQNLTWVGVDPYNNMSTTSPATYPFLEKSNNKHYEETLDEEQEEENYQRGNSALETLSLFPMHEENIISNFCIKHHESSGGWYHSDNNNLAALELTLNSFP

1. A method of producing a transgenic dicot plant that contains a heterologous polynucleotide comprising:
contacting a dicot vegetative plant organ or its composite tissue with a T-DNA containing the heterologous polynucleotide and a morphogenic gene expression cassette;
selecting a plant cell containing the heterologous polynucleotide and no morphogenic gene expression cassette, wherein the plant cell forms a regenerable plant structure containing the heterologous polynucleotide and no morphogenic gene expression cassette; and
regenerating a transgenic plant from the regenerable plant structure containing the heterologous polynucleotide and no morphogenic gene expression cassette.

2. The method of claim 1, wherein the morphogenic gene expression cassette comprises:
(i) a nucleotide sequence encoding a functional WUS/WOX polypeptide; or
(ii) a nucleotide sequence encoding a Babyboom (BBM) polypeptide or an Ovule Development Protein 2 (ODP2) polypeptide; or
(iii) a combination of (i) and (ii).

3. The method of claim 2, wherein the nucleotide sequence encodes the functional WUS/WOX polypeptide.

4. The method of claim 3, wherein the nucleotide sequence encoding the functional WUS/WOX polypeptide is selected from WUS, WUS1, WUS2, WUS3, WOX2 A, WOX4, WOX5, and WOX9.

5. The method of claim 2, wherein the nucleotide sequence encodes the Babyboom (BBM) polypeptide or the Ovule Development Protein 2 (ODP2) polypeptide.

6. The method of claim 5, wherein the nucleotide sequence encoding the Babyboom (BBM) polypeptide is selected from BBM2, BMN2, and BMN3 or the Ovule Development Protein 2 (ODP2) polypeptide is ODP2.

7. The method of claim 2, wherein the nucleotide sequence encodes the functional WUS/WOX polypeptide and the Babyboom (BBM) polypeptide or the Ovule Development Protein 2 (ODP2) polypeptide.

8. The method of claim 7, wherein the nucleotide sequence encoding the functional WUS/WOX polypeptide is selected from WUS, WUS1, WUS2, WUS3, WOX2 A, WOX4, WOX5, and WOX9 and the Babyboom (BBM) polypeptide is selected from BBM2, BMN2, and BMN3 or the Ovule Development Protein 2 (ODP2) polypeptide is ODP2.

9. The method of claim 1, wherein the heterologous polynucleotide is selected from the group consisting of:
a heterologous polynucleotide conferring a nutritional enhancement, a heterologous polynucleotide conferring a modified oil content, a heterologous polynucleotide conferring a modified protein content, a heterologous polynucleotide conferring a modified metabolite content, a heterologous polynucleotide conferring increased yield, a heterologous polynucleotide conferring abiotic stress tolerance, a heterologous polynucleotide conferring drought tolerance, a heterologous polynucleotide conferring cold tolerance, a heterologous polynucleotide conferring herbicide tolerance, a heterologous polynucleotide conferring pest resistance, a heterologous polynucleotide conferring pathogen resistance, a heterologous polynucleotide conferring insect resistance, a heterologous polynucleotide conferring nitrogen use efficiency (NUE), a heterologous polynucleotide conferring disease resistance, a heterologous polynucleotide conferring increased biomass, a heterologous polynucleotide conferring an ability to alter a metabolic pathway, and a combination of the foregoing.

10. The method of claim 1, wherein the dicot vegetative plant organ or its composite tissue is selected from the group consisting of a leaf explant, a leaf primordia, a stipule, a cotyledon, a cotyledonary node, a mesocotyl, a stem explant, a primary root, a lateral secondary root, a root segment, a bud, and a meristem, including but not limited to an apical meristem, a root meristem, a secondary meristem, an axillary meristem, a floral meristem, and a combination of the foregoing.

11. The method of claim 10, wherein the leaf explant is selected from the group consisting of a leaf, a radical leaf, a cauline leaf, an alternate leaf, and opposite leaf, a decussate leaf, an opposite superposed leaf, a whorled leaf, a petiolate leaf, a sessile leaf, a subsessile leaf, a stipulate leaf, an exstipulate leaf, a simple leaf, a compound leaf, and a combination of the foregoing.

12. The method of claim 10, wherein the stem explant is selected from the group consisting of a stem nodal region, a stem internodal region, a petiole, a hypocotyl, an epicotyl, a stolon, a rhizome, a tuber, a corm, and a combination of the foregoing.

13. The method of claim 1, wherein the dicot is selected from the group consisting of soybean, cotton, sunflower, cassava, common bean, cowpea, tomato, potato, beet, grape, Eucalyptus, citrus, papaya, cacao, cucumber, apple, Capsicum, melon, and Brassica.

14. The method of claim 1, wherein the morphogenic gene expression cassette comprises a polynucleotide encoding a functional WUS/WOX polypeptide,
wherein the functional WUS/WOX polypeptide comprises an amino acid sequence of any of SEQ ID NOS: 61, 63, 65, 67, 69, 71, 73, 75, 77, 79, 81, 83, 85, 87, 89, 91, 93, 95, 97, 99, 101, 103, 105, 107, 128, 130, 132, 134, 136, 138, 140, 142, 144, 146, or 148; or wherein the functional WUS/WOX polypeptide is encoded by a nucleotide sequence of any of SEQ ID NOS: 60, 62, 64, 66, 68, 70, 72, 74, 76, 78, 80, 82, 84, 86, 88, 90, 92, 94, 96, 98, 100, 102, 104, 106, 127, 129, 131, 133, 135, 137, 139, 141, 143, 145, or 147.

15. The method of claim 1, wherein the morphogenic gene expression cassette further comprises a polynucleotide sequence encoding a site-specific recombinase selected from the group consisting of FLP, FLPe, KD, Cre, SSV1, lambda Int, phi C31 Int, HK022, R, B2, B3, Gin, Tn1721, CinH, ParA, Tn5053, Bxb1, TP907-1, or U153, wherein the site-specific recombinase is operably linked to a constitutive promoter, an inducible promoter, a tissue-specific promoter, or a developmentally regulated promoter.

16. The method of claim 15, further comprising excising the morphogenic gene expression cassette.

17. The transgenic plant produced by the method of claim 1.

18. A seed of the transgenic plant of claim 1, wherein the seed comprises the heterologous polynucleotide.

19. The method of claim 13, wherein the regenerable plant structure is formed at an increased frequency of from about 0.1% to about 1.0%, from about 1.1% to about 10%, from about 10.1% to about 20%, from about 20.1% to about 30%, from about 30.1% to about 40%, from about 40.1% to about 50%, from about 50.1% to about 60%, from about 60.1% to about 70%, from about 70.1% to about 80%, from about 80.1% to about 90%, and from about 90.1% to about 100%, compared to the frequency of regenerable plant structures formed when the dicot vegetative plant organ or its composite tissue is not contacted with the morphogenic gene expression cassette.

20. A method of producing a genome-edited dicot plant comprising:
contacting a dicot vegetative plant organ or its composite tissue with a T-DNA containing a morphogenic gene expression cassette and providing a polynucleotide encoding a site-specific polypeptide or a site-specific polypeptide;
selecting a plant cell containing a genome edit and no morphogenic gene expression cassette, wherein the plant cell forms a regenerable plant structure containing the genome edit and no morphogenic gene expression cassette; and
regenerating a genome-edited plant from the regenerable plant structure containing the genome edit and no morphogenic gene expression cassette.

21. The method of claim 20, wherein the morphogenic gene expression cassette comprises:
(i) a nucleotide sequence encoding a functional WUS/WOX polypeptide; or
(ii) a nucleotide sequence encoding a Babyboom (BBM) polypeptide or an Ovule Development Protein 2 (ODP2) polypeptide; or
(iii) a combination of (i) and (ii).

22. The method of claim 21, wherein the nucleotide sequence encodes the functional WUS/WOX polypeptide.

23. The method of claim 22, wherein the nucleotide sequence encoding the functional WUS/WOX polypeptide is selected from WUS, WUS1, WUS2, WUS3, WOX2 A, WOX4, WOX5, and WOX9.

24. The method of claim 21, wherein the nucleotide sequence encodes the Babyboom (BBM) polypeptide or the Ovule Development Protein 2 (ODP2) polypeptide.

25. The method of claim 24, wherein the nucleotide sequence encoding the Babyboom (BBM) polypeptide is selected from BBM2, BMN2, and BMN3 or the Ovule Development Protein 2 (ODP2) polypeptide is ODP2.

26. The method of claim 21, wherein the nucleotide sequence encodes the functional WUS/WOX polypeptide and the Babyboom (BBM) polypeptide or the Ovule Development Protein 2 (ODP2) polypeptide.

27. The method of claim 26, wherein the nucleotide sequence encoding the functional WUS/WOX polypeptide is selected from WUS, WUS1, WUS2, WUS3, WOX2 A, WOX4, WOX5, and WOX9 and the Babyboom (BBM) polypeptide is selected from BBM2, BMN2, and BMN3 or the Ovule Development Protein 2 (ODP2) polypeptide is ODP2.

28. The method of claim 21, wherein the site-specific polypeptide is selected from the group consisting of a zinc finger nuclease, a meganuclease, TALEN, and a CRISPR-Cas nuclease.

29. The method of claim 28, wherein the CRISPR-Cas nuclease is Cas9 or Cpfl nuclease and further comprising providing a guide RNA.

30. The method of claim 20, wherein the site-specific nuclease effects an insertion, a deletion, or a substitution mutation.

31. The method of claim 29, wherein the guide RNA and CRISPR-Cas nuclease is a ribonucleoprotein complex.

32. The method of claim 20, wherein the dicot vegetative plant organ or its composite tissue is selected from the group consisting of a leaf explant, a leaf primordia, a stipule, a cotyledon, a cotyledonary node, a mesocotyl, a stem explant, a primary root, a lateral secondary root, a root segment, a bud, and a meristem, including but not limited to an apical meristem, a root meristem, a secondary meristem, an axillary meristem, a floral meristem, and a combination of the foregoing.

33. The method of claim 32, wherein the leaf explant is selected from the group consisting of a leaf, a radical leaf, a cauline leaf, an alternate leaf, and opposite leaf, a decussate leaf, an opposite superposed leaf, a whorled leaf, a petiolate leaf, a sessile leaf, a subsessile leaf, a stipulate leaf, an exstipulate leaf, a simple leaf, a compound leaf, and a combination of the foregoing.

34. The method of claim 32, wherein the stem explant is selected from the group consisting of a stem nodal region, a stem internodal region, a petiole, a hypocotyl, an epicotyl, a stolon, a rhizome, a tuber, a corm, and a combination of the foregoing.

35. The method of claim 20, wherein the dicot, is selected from the group consisting of soybean, cotton, sunflower, cassava, common bean, cowpea, tomato, potato, beet, grape, Eucalyptus, citrus, papaya, cacao, cucumber, apple, Capsicum, melon, and Brassica.

36. The method of claim 20, wherein the morphogenic gene expression cassette comprises a polynucleotide encoding a functional WUS/WOX polypeptide,
wherein the functional WUS/WOX polypeptide comprises an amino acid sequence of any of SEQ ID NOS: 61, 63, 65, 67, 69, 71, 73, 75, 77, 79, 81, 83, 85, 87, 89, 91, 93, 95, 97, 99, 101, 103, 105, 107, 128, 130, 132, 134, 136, 138, 140, 142, 144, 146, or 148; or wherein the functional WUS/WOX polypeptide is encoded by a nucleotide sequence of any of SEQ ID NOS: 60, 62, 64, 66, 68, 70, 72, 74, 76, 78, 80, 82, 84, 86, 88, 90, 92, 94, 96, 98, 100, 102, 104, 106, 127, 129, 131, 133, 135, 137, 139, 141, 143, 145, or 147.

37. The method of claim 20 or 21, wherein the morphogenic gene expression cassette further comprises a polynucleotide sequence encoding a site-specific recombinase selected from the group consisting of FLP, FLPe, KD, Cre, SSV1, lambda Int, phi C31 Int, HK022, R, B2, B3, Gin, Tn1721, CinH, ParA, Tn5053, Bxb1, TP907-1, or U153, wherein the site-specific recombinase is operably linked to a constitutive promoter, an inducible promoter, a tissue-specific promoter, or a developmentally regulated promoter.

38. The method of claim 37, further comprising excising the morphogenic gene expression cassette.

39. The genome-edited plant produced by the method of claim 20.

40. A seed of the genome-edited plant of claim 20, wherein the seed comprises the genome edit.

41. The method of claim 35, wherein the regenerable plant structure is formed at an increased frequency of from about 0.1% to about 1.0%, from about 1.1% to about 10%, from about 10.1% to about 20%, from about 20.1% to about 30%, from about 30.1% to about 40%, from about 40.1% to about 50%, from about 50.1% to about 60%, from about 60.1% to about 70%, from about 70.1% to about 80%, from about 80.1% to about 90%, and from about 90.1% to about 100%, compared to the frequency of genome-edited regenerable plant structures formed when the dicot vegetative plant organ or its composite tissue is not contacted with the morphogenic gene expression cassette.

42. The method of claim 2, wherein the heterologous polynucleotide is selected from the group consisting of:
a heterologous polynucleotide conferring a nutritional enhancement, a heterologous polynucleotide conferring a modified oil content, a heterologous polynucleotide conferring a modified protein content, a heterologous polynucleotide conferring a modified metabolite content, a heterologous polynucleotide conferring increased yield, a heterologous polynucleotide conferring abiotic stress tolerance, a heterologous polynucleotide conferring drought tolerance, a heterologous polynucleotide conferring cold tolerance, a heterologous polynucleotide conferring herbicide tolerance, a heterologous polynucleotide conferring pest resistance, a heterologous polynucleotide conferring pathogen resistance, a heterologous polynucleotide conferring insect resistance, a heterologous polynucleotide conferring nitrogen use efficiency (NUE), a heterologous polynucleotide conferring disease resistance, a heterologous polynucleotide conferring increased biomass, a heterologous polynucleotide conferring an ability to alter a metabolic pathway, and a combination of the foregoing.

43. The method of claim 3, wherein the heterologous polynucleotide is selected from the group consisting of:
a heterologous polynucleotide conferring a nutritional enhancement, a heterologous polynucleotide conferring a modified oil content, a heterologous polynucleotide conferring a modified protein content, a heterologous polynucleotide conferring a modified metabolite content, a heterologous polynucleotide conferring increased yield, a heterologous polynucleotide conferring abiotic stress tolerance, a heterologous polynucleotide conferring drought tolerance, a heterologous polynucleotide conferring cold tolerance, a heterologous polynucleotide conferring herbicide tolerance, a heterologous polynucleotide conferring pest resistance, a heterologous polynucleotide conferring pathogen resistance, a heterologous polynucleotide conferring insect resistance, a heterologous polynucleotide conferring nitrogen use efficiency (NUE), a heterologous polynucleotide conferring disease resistance, a heterologous polynucleotide conferring increased biomass, a heterologous polynucleotide conferring an ability to alter a metabolic pathway, and a combination of the foregoing.

44. The method of claim 4, wherein the heterologous polynucleotide is selected from the group consisting of:
a heterologous polynucleotide conferring a nutritional enhancement, a heterologous polynucleotide conferring a modified oil content, a heterologous polynucleotide conferring a modified protein content, a heterologous polynucleotide conferring a modified metabolite content, a heterologous polynucleotide conferring increased yield, a heterologous polynucleotide conferring abiotic stress tolerance, a heterologous polynucleotide conferring drought tolerance, a heterologous polynucleotide conferring cold tolerance, a heterologous polynucleotide conferring herbicide tolerance, a heterologous polynucleotide conferring pest resistance, a heterologous polynucleotide conferring pathogen resistance, a heterologous polynucleotide conferring insect resistance, a heterologous polynucleotide conferring nitrogen use efficiency (NUE), a heterologous polynucleotide conferring disease resistance, a heterologous polynucleotide conferring increased biomass, a heterologous polynucleotide conferring an ability to alter a metabolic pathway, and a combination of the foregoing.

45. The method of claim 5, wherein the heterologous polynucleotide is selected from the group consisting of:
a heterologous polynucleotide conferring a nutritional enhancement, a heterologous polynucleotide conferring a modified oil content, a heterologous polynucleotide conferring a modified protein content, a heterologous polynucleotide conferring a modified metabolite content, a heterologous polynucleotide conferring increased yield, a heterologous polynucleotide conferring abiotic stress tolerance, a heterologous polynucleotide conferring drought tolerance, a heterologous polynucleotide conferring cold tolerance, a heterologous polynucleotide conferring herbicide tolerance, a heterologous polynucleotide conferring pest resistance, a heterologous polynucleotide conferring pathogen resistance, a heterologous polynucleotide conferring insect resistance, a heterologous polynucleotide conferring nitrogen use efficiency (NUE), a heterologous polynucleotide conferring disease resistance, a heterologous polynucleotide conferring increased biomass, a heterologous polynucleotide conferring an ability to alter a metabolic pathway, and a combination of the foregoing.

46. The method of claim 6, wherein the heterologous polynucleotide is selected from the group consisting of:
a heterologous polynucleotide conferring a nutritional enhancement, a heterologous polynucleotide conferring a modified oil content, a heterologous polynucleotide conferring a modified protein content, a heterologous polynucleotide conferring a modified metabolite content, a heterologous polynucleotide conferring increased yield, a heterologous polynucleotide conferring abiotic stress tolerance, a heterologous polynucleotide conferring drought tolerance, a heterologous polynucleotide conferring cold tolerance, a heterologous polynucleotide conferring herbicide tolerance, a heterologous polynucleotide conferring pest resistance, a heterologous polynucleotide conferring pathogen resistance, a heterologous polynucleotide conferring insect resistance, a heterologous polynucleotide conferring nitrogen use efficiency (NUE), a heterologous polynucleotide conferring disease resistance, a heterologous polynucleotide conferring increased biomass, a heterologous polynucleotide conferring an ability to alter a metabolic pathway, and a combination of the foregoing.

47. The method of claim 7, wherein the heterologous polynucleotide is selected from the group consisting of:
a heterologous polynucleotide conferring a nutritional enhancement, a heterologous polynucleotide conferring a modified oil content, a heterologous polynucleotide conferring a modified protein content, a heterologous polynucleotide conferring a modified metabolite content, a heterologous polynucleotide conferring increased yield, a heterologous polynucleotide conferring abiotic stress tolerance, a heterologous polynucleotide conferring drought tolerance, a heterologous polynucleotide conferring cold tolerance, a heterologous polynucleotide conferring herbicide tolerance, a heterologous polynucleotide conferring pest resistance, a heterologous polynucleotide conferring pathogen resistance, a heterologous polynucleotide conferring insect resistance, a heterologous polynucleotide conferring nitrogen use efficiency (NUE), a heterologous polynucleotide conferring disease resistance, a heterologous polynucleotide conferring increased biomass, a heterologous polynucleotide conferring an ability to alter a metabolic pathway, and a combination of the foregoing.

48. The method of claim 8, wherein the heterologous polynucleotide is selected from the group consisting of:
a heterologous polynucleotide conferring a nutritional enhancement, a heterologous polynucleotide conferring a modified oil content, a heterologous polynucleotide conferring a modified protein content, a heterologous polynucleotide conferring a modified metabolite content, a heterologous polynucleotide conferring increased yield, a heterologous polynucleotide conferring abiotic stress tolerance, a heterologous polynucleotide conferring drought tolerance, a heterologous polynucleotide conferring cold tolerance, a heterologous polynucleotide conferring herbicide tolerance, a heterologous polynucleotide conferring pest resistance, a heterologous polynucleotide conferring pathogen resistance, a heterologous polynucleotide conferring insect resistance, a heterologous polynucleotide conferring nitrogen use efficiency (NUE), a heterologous polynucleotide conferring disease resistance, a heterologous polynucleotide conferring increased biomass, a heterologous polynucleotide conferring an ability to alter a metabolic pathway, and a combination of the foregoing.

49. The method of claim 10, wherein the dicot is selected from the group consisting of soybean, cotton, sunflower, cassava, common bean, cowpea, tomato, potato, beet, grape, Eucalyptus, citrus, papaya, cacao, cucumber, apple, Capsicum, melon, and Brassica.

50. The method of claim 2, wherein the morphogenic gene expression cassette comprises a polynucleotide encoding a functional WUS/WOX polypeptide,
wherein the functional WUS/WOX polypeptide comprises an amino acid sequence of any of SEQ ID NOS: 61, 63, 65, 67, 69, 71, 73, 75, 77, 79, 81, 83, 85, 87, 89, 91, 93, 95, 97, 99, 101, 103, 105, 107, 128, 130, 132, 134, 136, 138, 140, 142, 144, 146, or 148; or wherein the functional WUS/WOX polypeptide is encoded by a nucleotide sequence of any of SEQ ID NOS: 60, 62, 64, 66, 68, 70, 72, 74, 76, 78, 80, 82, 84, 86, 88, 90, 92, 94, 96, 98, 100, 102, 104, 106, 127, 129, 131, 133, 135, 137, 139, 141, 143, 145, or 147.

51. The method of claim 3, wherein the morphogenic gene expression cassette comprises a polynucleotide encoding a functional WUS/WOX polypeptide,
wherein the functional WUS/WOX polypeptide comprises an amino acid sequence of any of SEQ ID NOS: 61, 63, 65, 67, 69, 71, 73, 75, 77, 79, 81, 83, 85, 87, 89, 91, 93, 95, 97, 99, 101, 103, 105, 107, 128, 130, 132, 134, 136, 138, 140, 142, 144, 146, or 148; or wherein the functional WUS/WOX polypeptide is encoded by a nucleotide sequence of any of SEQ ID NOS: 60, 62, 64, 66, 68, 70, 72, 74, 76, 78, 80, 82, 84, 86, 88, 90, 92, 94, 96, 98, 100, 102, 104, 106, 127, 129, 131, 133, 135, 137, 139, 141, 143, 145, or 147.

52. The method of claim 4, wherein the morphogenic gene expression cassette comprises a polynucleotide encoding a functional WUS/WOX polypeptide,
wherein the functional WUS/WOX polypeptide comprises an amino acid sequence of any of SEQ ID NOS: 61, 63, 65, 67, 69, 71, 73, 75, 77, 79, 81, 83, 85, 87, 89, 91, 93, 95, 97, 99, 101, 103, 105, 107, 128, 130, 132, 134, 136, 138, 140, 142, 144, 146, or 148; or wherein the functional WUS/WOX polypeptide is encoded by a nucleotide sequence of any of SEQ ID NOS: 60, 62, 64, 66, 68, 70, 72, 74, 76, 78, 80, 82, 84, 86, 88, 90, 92, 94, 96, 98, 100, 102, 104, 106, 127, 129, 131, 133, 135, 137, 139, 141, 143, 145, or 147.

53. The method of claim 7, wherein the morphogenic gene expression cassette comprises a polynucleotide encoding a functional WUS/WOX polypeptide,
wherein the functional WUS/WOX polypeptide comprises an amino acid sequence of any of SEQ ID NOS: 61, 63, 65, 67, 69, 71, 73, 75, 77, 79, 81, 83, 85, 87, 89, 91, 93, 95, 97, 99, 101, 103, 105, 107, 128, 130, 132, 134, 136, 138, 140, 142, 144, 146, or 148; or wherein the functional WUS/WOX polypeptide is encoded by a nucleotide sequence of any of SEQ ID NOS: 60, 62, 64, 66, 68, 70, 72, 74, 76, 78, 80, 82, 84, 86, 88, 90, 92, 94, 96, 98, 100, 102, 104, 106, 127, 129, 131, 133, 135, 137, 139, 141, 143, 145, or 147.

54. The method of claim 8, wherein the morphogenic gene expression cassette comprises a polynucleotide encoding a functional WUS/WOX polypeptide,
wherein the functional WUS/WOX polypeptide comprises an amino acid sequence of any of SEQ ID NOS: 61, 63, 65, 67, 69, 71, 73, 75, 77, 79, 81, 83, 85, 87, 89, 91, 93, 95, 97, 99, 101, 103, 105, 107, 128, 130, 132, 134, 136, 138, 140, 142, 144, 146, or 148; or wherein the functional WUS/WOX polypeptide is encoded by a nucleotide sequence of any of SEQ ID NOS: 60, 62, 64, 66, 68, 70, 72, 74, 76, 78, 80, 82, 84, 86, 88, 90, 92, 94, 96, 98, 100, 102, 104, 106, 127, 129, 131, 133, 135, 137, 139, 141, 143, 145, or 147.

55. The method of claim 2, wherein the morphogenic gene expression cassette further comprises a polynucleotide sequence encoding a site-specific recombinase selected from the group consisting of FLP, FLPe, KD, Cre, SSV1, lambda Int, phi C31 Int, HK022, R, B2, B3, Gin, Tn1721, CinH, ParA, Tn5053, Bxb1, TP907-1, or U153, wherein the site-specific recombinase is operably linked to a constitutive promoter, an inducible promoter, a tissue-specific promoter, or a developmentally regulated promoter.

56. The transgenic plant produced by the method of claim 16.

57. A seed of the transgenic plant of claim 17, wherein the seed comprises the heterologous polynucleotide.

58. The method of claim 14, wherein the regenerable plant structure is formed at an increased frequency of from about 0.1% to about 1.0%, from about 1.1% to about 10%, from about 10.1% to about 20%, from about 20.1% to about 30%, from about 30.1% to about 40%, from about 40.1% to about 50%, from about 50.1% to about 60%, from about 60.1% to about 70%, from about 70.1% to about 80%, from about 80.1% to about 90%, and from about 90.1% to about 100%, compared to the frequency of regenerable plant structures formed when the dicot vegetative plant organ or its composite tissue is not contacted with the morphogenic gene expression cassette.

59. The method of claim 28, wherein the site-specific nuclease effects an insertion, a deletion, or a substitution mutation.

60. The method of claim 29, wherein the site-specific nuclease effects an insertion, a deletion, or a substitution mutation.

61. The method of claim 32, wherein the dicot, is selected from the group consisting of soybean, cotton, sunflower, cassava, common bean, cowpea, tomato, potato, beet, grape, Eucalyptus, citrus, papaya, cacao, cucumber, apple, Capsicum, melon, and Brassica.

62. The method of claim 21, wherein the morphogenic gene expression cassette comprises a polynucleotide encoding a functional WUS/WOX polypeptide,
wherein the functional WUS/WOX polypeptide comprises an amino acid sequence of any of SEQ ID NOS: 61, 63, 65, 67, 69, 71, 73, 75, 77, 79, 81, 83, 85, 87, 89, 91, 93, 95, 97, 99, 101, 103, 105, 107, 128, 130, 132, 134, 136, 138, 140, 142, 144, 146, or 148; or wherein the functional WUS/WOX polypeptide is encoded by a nucleotide sequence of any of SEQ ID NOS: 60, 62, 64, 66, 68, 70, 72, 74, 76, 78, 80, 82, 84, 86, 88, 90, 92, 94, 96, 98, 100, 102, 104, 106, 127, 129, 131, 133, 135, 137, 139, 141, 143, 145, or 147.

63. The method of claim 22, wherein the morphogenic gene expression cassette comprises a polynucleotide encoding a functional WUS/WOX polypeptide,
wherein the functional WUS/WOX polypeptide comprises an amino acid sequence of any of SEQ ID NOS: 61, 63, 65, 67, 69, 71, 73, 75, 77, 79, 81, 83, 85, 87, 89, 91, 93, 95, 97, 99, 101, 103, 105, 107, 128, 130, 132, 134, 136, 138, 140, 142, 144, 146, or 148; or wherein the functional WUS/WOX polypeptide is encoded by a nucleotide sequence of any of SEQ ID NOS: 60, 62, 64, 66, 68, 70, 72, 74, 76, 78, 80, 82, 84, 86, 88, 90, 92, 94, 96, 98, 100, 102, 104, 106, 127, 129, 131, 133, 135, 137, 139, 141, 143, 145, or 147.

64. The method of claim 23, wherein the morphogenic gene expression cassette comprises a polynucleotide encoding a functional WUS/WOX polypeptide,
wherein the functional WUS/WOX polypeptide comprises an amino acid sequence of any of SEQ ID NOS: 61, 63, 65, 67, 69, 71, 73, 75, 77, 79, 81, 83, 85, 87, 89, 91, 93, 95, 97, 99, 101, 103, 105, 107, 128, 130, 132, 134, 136, 138, 140, 142, 144, 146, or 148; or wherein the functional WUS/WOX polypeptide is encoded by a nucleotide sequence of any of SEQ ID NOS: 60, 62, 64, 66, 68, 70, 72, 74, 76, 78, 80, 82, 84, 86, 88, 90, 92, 94, 96, 98, 100, 102, 104, 106, 127, 129, 131, 133, 135, 137, 139, 141, 143, 145, or 147.

65. The method of claim 26, wherein the morphogenic gene expression cassette comprises a polynucleotide encoding a functional WUS/WOX polypeptide,
wherein the functional WUS/WOX polypeptide comprises an amino acid sequence of any of SEQ ID NOS: 61, 63, 65, 67, 69, 71, 73, 75, 77, 79, 81, 83, 85, 87, 89, 91, 93, 95, 97, 99, 101, 103, 105, 107, 128, 130, 132, 134, 136, 138, 140, 142, 144, 146, or 148; or wherein the functional WUS/WOX polypeptide is encoded by a nucleotide sequence of any of SEQ ID NOS: 60, 62, 64, 66, 68, 70, 72, 74, 76, 78, 80, 82, 84, 86, 88, 90, 92, 94, 96, 98, 100, 102, 104, 106, 127, 129, 131, 133, 135, 137, 139, 141, 143, 145, or 147.

66. The method of claim 27, wherein the morphogenic gene expression cassette comprises a polynucleotide encoding a functional WUS/WOX polypeptide,
wherein the functional WUS/WOX polypeptide comprises an amino acid sequence of any of SEQ ID NOS: 61, 63, 65, 67, 69, 71, 73, 75, 77, 79, 81, 83, 85, 87, 89, 91, 93, 95, 97, 99, 101, 103, 105, 107, 128, 130, 132, 134, 136, 138, 140, 142, 144, 146, or 148; or wherein the functional WUS/WOX polypeptide is encoded by a nucleotide sequence of any of SEQ ID NOS: 60, 62, 64, 66, 68, 70, 72, 74, 76, 78, 80, 82, 84, 86, 88, 90, 92, 94, 96, 98, 100, 102, 104, 106, 127, 129, 131, 133, 135, 137, 139, 141, 143, 145, or 147.

67. The method of claim 21, wherein the morphogenic gene expression cassette further comprises a polynucleotide sequence encoding a site-specific recombinase selected from the group consisting of FLP, FLPe, KD, Cre, SSV1, lambda Int, phi C31 Int, HK022, R, B2, B3, Gin, Tn1721, CinH, ParA, Tn5053, Bxb1, TP907-1, or U153, wherein the site-specific recombinase is operably linked to a constitutive promoter, an inducible promoter, a tissue-specific promoter, or a developmentally regulated promoter.

68. The genome-edited plant produced by the method of claim 38.

69. A seed of the genome-edited plant of claim 39, wherein the seed comprises the genome edit.

70. The method of claim 36, wherein the regenerable plant structure is formed at an increased frequency of from about 0.1% to about 1.0%, from about 1.1% to about 10%, from about 10.1% to about 20%, from about 20.1% to about 30%, from about 30.1% to about 40%, from about 40.1% to about 50%, from about 50.1% to about 60%, from about 60.1% to about 70%, from about 70.1% to about 80%, from about 80.1% to about 90%, and from about 90.1% to about 100%, compared to the frequency of genome-edited regenerable plant structures formed when the dicot vegetative plant organ or its composite tissue is not contacted with the morphogenic gene expression cassette.
